United States Patent Application Publication US 2009/0191548 A1 - sequence listing, part 3

SEQ ID NO: 3954 - DNA, 2473 bp, Artificial Sequence
  chemically treated genomic DNA (Homo sapiens)
attaatttaggtattgaagttatatggaagttttttgttttaagatgattttttaggttagaaggtaattagaatttttttttgggttatggtagaaatgagaaaattaaagtaagtagataagtgaatatattggggtgtgtttgtgggtttaagtttgagatatgatggtttttgttattaggtagatggtttttaaagggtatttatgtttatgagtttgtgtgatttttttataggagttttggaagtagatggaagggttattttaattgagaggtgaaggatttgtttgttagagaggataagttatttggtgaaggttttataatttatgaaggtttgagttgagagttatttttgttttgttttggagttgtgtagggttgggttttgaagttttttgtaatattgtagttgaggtttttaaagtggtgttattatttttgtggtttttagaagtagaggagatattttaggtttttaagatttaaaagtattttagagaagatttagatttaattatttattatatagatgtgggaagtgagttattggtgggtgagaagttagtgagttagtaagatagtaataaagatgggggttgtttttaaaggttaagtttatggtagaaatttagtagttttagggtatgtagggttatagtaaaattttatttaaggatttgttgttgtaatgaaaatgtttattattgttgttattattattagtagtttatgtttagtagagttagtttttaataattatttttggtttttttttatttttgttatttagtagatttattagtatagtgtttggttttattattattattattattgtttattagttattttggttttaagaagtgttttaaaaataaattgattgaatgaatgaatgagtgattttagtagagtttttagagtgtttattttgttttgtttggtttggttgtttttttatattagattattgtttgtttttttgtgatatgaagttgttttttttattattagtatgaattggatttttaatttattgttttttggtttaagagttattataaagtgtttaattaagtaagttttgtttaattattaaatgtttgtatgtgaaataagtttttgggaagtagggtatttgatatgttttgtatagaaataattatgttgaggagggggagggttgtgggttgggattgggagtttttatattttatttgagggttttatttatttattattgaaggggaattaaaaggttttagttggagtaatttgagaatttttatatttttgttggatgaattatgggagtggggttgttgtttgggtttttaaaggtgtagagtaaggggagaggtgggaatttgagaggtgagttgggggttggtggggttttggggaggggtgtttttggggatataggggagttttgtttttttatagtttatgtgataataatttttttttggtttagtttttggtttgtgtgttttaagtgttgttttagatagttttaattgtttttttttttttattttaggaggaggtttgtaaattgtatatgaatttgtagaatatattggtggtggtggtggtggtggtggtggtggttagtggagtgtgtgtgtgtgtgtgtgtgtgtgtgtgtgtgtgtttgtaggttattatttaatttttttttaattttgtattttttatagagtattggattagttggtataagaatgaatttattttttttattttaatggttttttgtttatatttatatgtattagaaaaaaaaaatatatagaattagtattttattttttgattttaagggtattattaaattaaagttggtataaaggaaaaaaaataaattttttaaggtagaataaggatgtgaattaaattaggaaggagggttatattgaggtttgggatattgttttttagtattttatgttttttatggtatttgttttagtaggattttatgtttttggattgttaaaggtttttattatgtttattttgtagattaagaaatagaggtttaggaaatataatatagttttttattttttttttgggatggtggtggttgtattgtattgttagaaaaaattataaaagatgttgatatgggttaaaaaatttataaagattgttgaatgttttgtttagtataattttttaggatatttatgttttttattatttttgagttattttttaatttttgaagtttaagaaaaaaattaatagtaatataaatgtttggtgttatagaaatgtaaatgaattgtgtttagtggaatgtaattgattattatttttaagttattgattgattttgtatttatttgtaaatgaatgttagtatttgtgtttgtttgtatgtttatgtgtggtgtttaaatttttttttgaattagttgtgttattttttttgttttgttattaattaatgtttt

SEQ ID NO: 3955 - DNA, 2439 bp, Artificial Sequence
  chemically treated genomic DNA (Homo sapiens)
aggaggtggaggttgtagtgtgttgagattgtattattgtattttagtttggatattaagagtaaaatttagttttaaaaaggaaaaaaaaaaaaaaagaaaaaaggaaatagataaagatggtgatttttttggggaggtgatatatggttaagtattaaggatgagtaggttagatggaggagatagtggtggttttagatttttgtaagtattatgggaataagtatttagggtttatttgtattttttttttttggtatttagttaggtttttagtatgtagtaggtatatgggaaaatggtttattttgatttatttatttaatagttagtaggatgttttataagtatattagttatgttatttttagtttagattttgaatgatatgaggttttgatttattgggttttatgtgtttttttgattttatgttttgtttttttttttgttatttgtgttttagttatatttggttgtttgttttttaggttttaaatggttgttagggttttggtatttgttgtttttttgtttggagggttttttttttagatgtttatttaaaagttttttttttattaggttttttttgggttttttgaaattttaattttttttattattttagagtttttttgtttttttatttttgtatttattttaatatatggtatattttatttatttgttttggttgtttgtttagaatataattttatgaggataggtatgttttgtgttttgtttagttttgaaatggtagaatggtgtttagtttttagtatgtggttaataaataggtagtgattttatgagttaattaatgagtgaattaatgaatgattagtaaatgaatgaatgagtgaatgagtgagtgattagtaagagtgaattaatgagtgtgtagattgttgtgtgattaagtgggttagtgtgaaaggtggggggtagaggttgggtgagttttttgggatgtgggtagtaaggatagggttgtggtgtgaattaagatatggtgttttttgtttttgttttttttttgtagggagaggggttattttggttttgagtatttttaattttatgtgaattatgtggatgggtggatagttggagggttagtagtagtagtaggagtttttgtttatttgggggttttgagtgttggtatgatttgattttatggtgtgggtggggtttgggtttatttggaggagtaggatatgttgttggattatagttgggggtgttagatttaggttatgttatatttggtgttagagtttaagatttaggaatagaaattgtgtatggggttaagttggttgtagtttaatatttaggtgattttaggtttaaagtatgtttttggtttttgagatgggttttgtagttgtagtttatgttttggattttgttagttgggtttggtatatttttgttgtttgtttttgtttttaggtttattattttttgttttgttattagggagttatttttagttagtttgttattgtggttatttttttgttttaagtttttttatggtttttattgttaggattttttatgatttattttaggtaggaagtgaggagagaggagaggtgtagggtatggttgggtgtggtggtttatgtttgtaattttggtattttgggaggttgaggtgggtggattatgaagttaggagattaagattattttggttaatatggtgaaattttatttttattgaaaatataaaaattagttggtatgatggtgtatgtttgtagttttagttatttaggaggttgaggtagaagaattgtttgaatttgggaggtagaggttgtagtgagttgagattgtgttattgtattttagtttggtaatagagtgagattttgttttaaaaaaaaaaaaaaaaaattgagaggtgtagggtaatggagatagaaggttaaaggttgggttagatttttattagttaggtttttggtattagttttgtagattttaattaggggtattagtattaggggttaggtttaagggtttagaaaaggttttttaagttggtgttttttatttttatataaattgtatttttatttgtttttatagtaagggtgttatttttttagttttgtgtttagtttagtttagtttagtattggttaattatgatttaataaaatggagtttgtattgagttttttatttaggttgagtgttgatagagaggtttttagagtattagggttatgtttttggagattttgatgttttgatgggaatatagaggttttgagaggtaaaggtgttagaggtgtgtgagttagattaatattattttaaataggagttgagtaaaatgaggttgatatttattgggttgtatttttagatgggtaaggtattttaagttatagggtgagataggagttt

SEQ ID NO: 3956 - DNA, 2439 bp, Artificial Sequence
  chemically treated genomic DNA (Homo sapiens)
gaatttttattttattttgtgatttagaatgttttatttgtttgggaatgtagtttagtaggtgttagttttattttatttagtttttatttaagatggtgttggtttggtttatatgtttttgatatttttgttttttggggtttttgtgtttttgttaggatattggaatttttaagggtataattttggtgttttgggagtttttttgttagtatttagtttggatggagggtttagtgtggattttgttttgttgggttatggttggttagtgttaggttgagttgggttggatatagggttggaggggtagtgtttttattgtagggataggtgggggtgtaatttgtgtagggatgaaaagtattagtttggagggttttttttaggtttttgggtttagtttttgatgttgatgtttttagttggggtttgtagagttggtgttaagaatttggttggtaggggtttgatttagtttttggttttttgtttttattgttttgtattttttgattttttttttttttttttgagatggagttttgttttattgttaggttagagtgtagtggtatgattttagtttattgtaatttttgttttttgagtttaagtgatttttttgttttagttttttgagtagttgagattataggtgtgtattattatgttagttaatttttgtatttttagtagagatggggttttattgtgttggttaggatggttttaattttttgattttatgatttgtttattttagttttttaaagtgttgggattataggtgtgagttattgtgtttggttatgttttgtattttttttttttttttattttttgtttaagatgagttatggggaattttggtgatgggagttatggaagggtttagagtaggggagtggttatagtaataggttaattgggagtagttttttggtgatagggtgggaagtagtgagtttggaggtaggggtaggtagtaggggtgtgttaagtttagttgataaggtttaggatataggttgtaattgtgaggtttgttttgggggttaggagtatgttttgggtttgaggttatttggatattgggttgtggttaatttggttttatatatagtttttatttttgggttttgggttttgatattaaatatggtgtggtttgagtttggtatttttaattgtggtttgatgatatattttgtttttttaagtgggtttggattttgtttatattatggagttagattatgttagtatttggggtttttaagtgggtagaggtttttgttgttgttattggttttttaattgtttatttgtttgtgtggtttatatggggttaaaagtatttaggattaaaatagtttttttttttgtagaagaaagataggggtagggggtattatgttttggtttatattatagttttgtttttgttatttgtattttagggagtttatttggtttttgttttttattttttgtattggtttatttggttatatagtgatttatatatttattggtttatttttattggttatttatttgtttatttatttatttatttattgattatttattaatttatttattggttaatttatggaattattgtttatttattgattatatattaagagttggatattgttttattattttagagttgaataaaatataaaatatatttatttttatggggttatgttttagatagataattaaagtaaataagtaggatgtattgtgtgttagaataaatgtaaggatgaggaaatgagggggttttgaggtgatggggggagttggaattttagggggtttagggaggatttggtgggaaggggatttttgagtgggtatttgagagaagaattttttaagtagaagaatagtaggtgttaaggttttagtagttgtttgaggtttgaaaaataggtggttaggtgtggttggggtataggtggtggggagagaagtagaatgtgaggttagggggatatatggggtttagtggattagggttttatgttatttagggtttgagttgagaatgatgtggttgatatatttgtaaagtattttgttggttgttgagtgaatgggttagagtgagttatttttttatgtgtttgttgtgtgttgggaatttagttgggtgttggggagagaagatgtaggtgaattttagatgtttatttttatggtgtttgtagaggtttggagttattattgttttttttatttgatttgtttatttttggtgtttaattatgtgttatttttttaagggagttattatttttgtttgttttttttttttttttttttttttttttttttttgaaattgagttttgtttttgatgtttaggttggagtgtagtggtgtaattttggtgtattgtaatttttgtttttt

SEQ ID NO: 3957 - DNA, 2188 bp, Artificial Sequence
  chemically treated genomic DNA (Homo sapiens)
ttgtgaaaatgtttttgagagaggggaaggagttgggaggttttgatgtaaagatattgaagagtagttttggaagtttatagaaaatgtgagtttttagaaaataagaaggaaggttggtgtagagggtgggtttggggtattgtagtgggattggtttttggttggagggaatttgtggtagggaaggtaggggaggggaagatgtgagtgggtttgtatatgtattgttgtgagatgagagggtttgtattagttagggttttgtagagaaatagagttaataggatatatgtatataggaagagatttgtaaggagatattttgtgtaattttggaggttgagaagttttatgatttgttgtttgtaagttggatatttaggaatgttggtagtgtaagttttaagatttgagggttgggatttaatggagtggatgttagttagagtttgaatttttgagaattaggagtattaatggttagagggaatggatgtttgttttgggttaggtagagagaatttaaatgttttttatttttttgttttgttttggtttttatagattggatgaggtttatttattttggggaggggttagttgttgtgtttagtttgttattgtaaatatgaagtttttttagaaatgtttttatagatattttggaagttatgtatttattttgtaggtgttttggggtataggtaagtggatgagttagttattttttagagtttttgttgttttgtttgtttttttttggaaatgtgaagtgtggttttagttgaaagtgaggtgagtgtgagtgtggatatgtgttagtgtgtgtgtgtatgggaggagtgtgtgtgtgtttgatgatgatgatggagtttagtgagttattgtttgtggagtgttagagttttttaggatggttatgttgaaggtgtggaaggaggtggttggtttagtgttagatgtttttagtatttgtgggagtgaaatggaggttggtgggtggttgtgatgtgtttttttaagaatggattttgtaggttttttttttttttggtttttggtgttggaaggaggatattgtgagtgttgtttgtttgtttatagagagtgtgtagtagtagtagtagtagtttggggttagttttgggaggattaaggatattttagggttttaagttaggggatgatatagtgggtttaaatttaggaaaaaaaaaaaaatgtttttggtggtaaggatagggagagattgaataagtttggggtaagtggtaaaattagagaaagaaaattttttaggaggtttgagtttaggaaagtaattttaaggatttgagttgataaagttattttggaggtggaggtattaggtttagttggagagattgtgagggtgaagaatttataggattttttgtgaaagaaaagaaataagtttagttttgagtattttgtattttttatttggggggaaaaaggagttataaaaattgtaggtaggtgtgtattatgttttggtaatttttaaaggattgtttttaatatgataggtatataaaagattttaaaagtaattgttttatgtgtatattattgattgtttttggagttttatggtattaaggtagagttttgttattaattatagttttatggtagtagagttatgttggtaggtagttgagggaatgtgaggatattagaattggggtttataggaggtaaaaatttgtagttgtttgtaggaggttttaggttttttgtatttgtttttgttattttgtggattggggtagttagtatagtaaagagttggtttttggagtttatagtttgtagggagatagataggaaaatagatgatgagatgtttttttattatagtaggtattattttattatggtatggtaggaaaagtatttagatttgttggggtatttgttgaaatgaggtagagaagtttttttttgtatagttttttgagttttttttaggggaagtgatgaaggggtgatgttgttgttgtttagaaattttttgatagtttgtttggggtagaatgtggggatttgaagggtgtaagtgtgagtataattttttatggattgttgtgtgagatgatgagaaaggaatttatttatttttttggagggaggaggagatatgggggtagggggggagtta

SEQ ID NO: 3958 - DNA, 2188 bp, Artificial Sequence
  chemically treated genomic DNA (Homo sapiens)
tggttttttttttgtttttatgtttttttttttttttagaaagatgggtgagttttttttttattattttatataataatttatgaagaattgtgtttatgtttgtattttttagatttttatattttgttttaagtaggttgttaagaaatttttgagtaataataatgttatttttttgttattttttttggaaagaatttaggagattgtgtagaaggaaatttttttattttattttaatagatgttttagtaaatttaagtgttttttttgttgtgttgtggtaaaatagtgtttgttatgatgagagggtgttttattatttgtttttttgtttgtttttttgtaggttgtgggttttgggggttggttttttgttgtattggttgttttaatttataggataatagaggtgggtgtaggaagtttgaggttttttataagtagttgtaggtttttgttttttgtgaattttagttttgatgtttttatgtttttttagttatttgttggtgtaattttgttgttatggagttgtggttaatggtaaagttttgttttggtgttataaggttttaggagtagttgataatgtatatgtaaagtagttgtttttaaaattttttatgtgtttattatattaaaagtaattttttggaaattattaagatatgatgtatatttgtttgtaatttttatagtttttttttttttttaagtgaagaatgtaaaatatttaaaattgagtttgtttttttttttttataaaaggttttgtaggttttttgtttttataatttttttagttgggtttgatgtttttatttttaggatgattttgttagtttggatttttaaggttgtttttttgggtttagattttttggaaggttttttttttttgattttgttatttattttaaatttatttagtttttttttgtttttgttattagaagtattttttttttttttttgaatttaagtttattgtgttattttttggtttaaaattttgaaatatttttagtttttttaaagttggttttgggttgttgttgttgttgttgtatattttttgtaagtaaataagtaatatttgtggtgttttttttttggtattggagattgggaggaagaagaatttgtaggatttatttttaaagaaatatattataattatttattagtttttgttttatttttgtggatgttggaaatgtttgatgttgggttagttgtttttttttgtatttttggtgtggttattttaggaggttttgatattttatggatggtggtttattgggttttattattgttattaagtgtatatatattttttttatgtatatgtatattgatatatgtttatatttatgtttattttatttttagttgaggttatattttatgtttttgagagaaagtgggtgaggtagtaggagttttgagggataattggtttgtttgtttgtttgtgttttggggtatttatagagtgggtatgtgatttttggggtgtttgtgagggtgtttttggaagagttttgtgtttgtaatggtggattgaatatagtagttggtttttttttaaggtgggtgggttttgtttaatttgtggaagttggaataggataaaaaggtggagggtgtttggattttttttgtttgatttaaggtagatatttgttttttttggttgttggtatttttggtttttagggatttagattttgattggtgtttattttattggattttggtttttaggttttggaatttgtattgttagtatttttgggtgtttggtttgtggatagtagattgtgggattttttagtttttagaattgtatgaagtgtttttttatgaatttttttttatgtatgtgtattttattggttttgtttttttgtagaattttgattaatgtaaatttttttattttatagtagtgtatgtataaatttatttatattttttttttttttgttttttttattgtaagttttttttgattagaggttaattttgttgtggtgttttggatttattttttgtattagtttttttttttgttttttaaaagtttgtgttttttgtgggtttttaaggttgttttttagtatttttatgttagagttttttagttttttttttttttttaaaagtgtttttatag

SEQ ID NO: 3959 - DNA, 2449 bp, Artificial Sequence
  chemically treated genomic DNA (Homo sapiens)
gttttttttgttttttgagtaggggttgagggtgtgttgggagaggagggttggggttagggagggagtgggtatgtagattttagaagtttgggagttagtggttgggttttggattttgttatagtattgtggaggtttgagagggttaggttagtttttgagttttttggtttggaaagggtttttatgtgggtgggttaggaggtagagatggatattatgtttaggtttggttttatttatttttaatgttaggaggattgggggaggttattgagttttttagagttttagggatttttttgtgtttttttatattttggtttttaagggatttagaaagggaggtatagtttatgagttttattttattttattttatttattttttgagagggagttttgttttgttgtttaggttggagtgtaatggtataattttggtttagtgtaatttttattttttgggtttaagtgatttttttattttagttttttaagtagttggaattataggtgttagttattatgtttggttaatttttgtatttttagtagagttagggttttgttatgttggttaggttggtgttaaatttttgatttaggtgatttgtttgttttagatttttaaagtgttgggattataggtgtgagttattgtgtttagttatgagttttgttttatagatttgagagttgaggttttgagaagtaaggtttggttaggttttttggtttagggaggtttagggttaggttgtttttaaggttaggttataggattgtttggggtatagggtttgttgttgggttaatatttttttttttgtttgttagtattgagggggagtatgtgttagtggagggtgatgaggtgatttataagatgtgttttattttttttaagaattagaagttttaggttgtggaggtggtgtttatttagttggttttttatattttttatgagatgtggtttggttaggttgtgggtttttaggttgagtggtttataggttagttggttgggggttggggagttatatagggtgaatgggtagtagttggttttatgttttattgttttggttgatgagttttttggtggttttagtgtgtatgtttgtttgtttgtttgtgtttgtggttatgagtgtgtgtttttatttattttatgatttgtgattattgtgtaagttggttaggaggtaggtggagggtaaggttattagatttggttttgtgttgtttattgtttttttttttttttttttgttgtagatatgtaggatttgtttgtttttttgtttatttgtttttatggtgattgagttgtgagagtttgtgttgggtttattttttggtttttgtttttgagttgttttgtgttagtttttggtttggagttaggttttttgtgttatttatattttttttttttggttgaggttttttgttatagtttggattttttttttagaagtttggttgatgggtgtttttggggagttttttagtttttggtaggggaggaggattgatatggaggtatataggttttttattgttgaggttagtttttttttttgttttgtttttttagtgttatggagaggtaggaagaggggtttgagggtggaaggggtttggggtttttattttgttggttagttttttttttttagtttggtagtggtgttgggtttttttttttgggttgtattgagttgagtttaggggtttgtagagggtgggggtttatttttttagtttggttgtagattttttttattttgatttataagttttattgatgttttgggttatgtttggttgatggttgttgtggatgttgtgagggatggatatatgtttggggtatttatgaggagggtttttagtttgggagattggttttgtggtttttatgttaaattttttttttaaagttttaatagattagtggttgaggtgtggtttttattgtatttatttttgaagatgtgtggttgttgttgttatttggagtttttttggggttaagatgtgtgtgtatttggggttgtggttatttatttttaggtaggggtgagggtggtttggtttaggaggttaggaaggagggttttgtttgtttttatttttgggtgtattttttgtttattatttttttttttagagagtatattgtttgattggggagaagtggggttgtggtttgagggagggttggttaggggtgggatttttatgagatttagtttgtgagtaaaattgggggtttaaatgtttaggatgaggggattagtgattgtttaggaggattttttgttttgtaggtgttttaagattgtagggtagaaattagttgggatgtttgtattttatttttggttttagggtttattatataaaatttgggagtttagagttgttgaggtgt

SEQ ID NO: 3960 - DNA, 2449 bp, Artificial Sequence
  chemically treated genomic DNA (Homo sapiens)
atattttagtagttttgggtttttagattttatgtggtgggttttggggttgggggtgggatgtaggtattttggttgatttttattttgtggttttggggtatttataaggtaagggatttttttagatagttattgatttttttattttgggtatttgagtttttagttttatttatagattgagttttataagggttttatttttggttagtttttttttgaattatggttttatttttttttggttaggtgatgtgttttttagaagggagggtggtaggtagggggtgtatttagaggtggaggtagatagggtttttttttttggttttttgggttaggttatttttatttttgtttgggagtgaatggttatgattttgggtgtatatatattttggttttaaaaggattttaggtgatagtaatagttatatatttttagggatggatgtaataagagttatattttggttattggtttgttagggttttgggaagagagtttgatgtggaggttgtagggttagttttttaggttgggggttttttttgtgggtgttttggatgtgtgtttgttttttgtggtatttatagtagttgttagttgggtatggtttagagtattagtggggtttgtgagttagggtaaaggaggtttgtagttaagttggagagatggatttttattttttgtaaatttttgggtttggtttagtatagtttaggggaaggagtttagtgttattgttaggttgaggaggagggattggttggtgaaatgggagttttaaattttttttgtttttaggtttttttttttgtttttttatggtattgagagagtagagtaggaaggaaggttggttttggtagtgagaggtttgtgtgtttttgtgttagttttttttttttgttagaggttgagaggttttttaaaagtatttattggttaggtttttgagggaagggtttaggttgtggtgggggattttagttaagggagggagatgtaagtagtatagagagtttggttttgggttagggattgatatgggatagtttaggggtggaggttagggagtgagtttagtgtaggtttttgtagtttagttattgtggggatgggtaagtaggagggtgagtgggttttgtgtgtttgtggtagggaggggaggagagaggtagtggatagtgtgaagttaggtttggtggttttgttttttatttattttttggttagtttgtatagtagttatgggttgtggggtgggtggaggtatatgtttatagttataagtatagatggatagatagatgtgtatattgaggttattgaaggatttattagttagggtagtggggtatggagttggttgttgtttgtttattttgtgtggttttttaatttttggttagttggtttgtgaattatttagtttaggagtttatgatttggttagattatgttttgtggggagtgtggggggttagttgagtgagtattatttttatggtttggaatttttggtttttgggagggatagggtatattttgtaggttattttgttgttttttattggtatgtatttttttttgatgttggtgggtaggaagaggggtattagtttagtagtaggttttgtgttttagataattttgtggtttggttttgggggtagtttggttttaagtttttttaggttaggaggtttggttaggttttgttttttagaattttagtttttgaatttgtaaaatgggatttatggttgggtatagtggtttatgtttgtaattttagtattttgggagtttgaggtgggtggattatttgagttaggagtttgatattaatttggttaatatggtgaaattttggttttattaaaagtataaaaattagttaggtatggtggttggtatttgtaattttagttatttgggaggttgaggtgggagaattgtttgaatttaggaagtggaggttgtattgagttgagattgtgttattgtattttagtttgggtgatagagtgagatttttttttaaaaaataaataaaataaaataaaatgggatttataaattgtatttttttttttgggttttttggggattgagatgtgaaagggtatggggaggtttttaaagttttgagaagtttagtgattttttttggtttttttggtattagaagtgggtggggttaggtttagatatgatatttatttttattttttggtttatttatatgaaggttttttttaggttaagaggtttaggagttggtttagtttttttagatttttatgatgttgtaataggatttagggtttagttgttggtttttaggtttttggggtttgtgtgtttattttttttttggttttagttttttttttttaatgtatttttagtttttatttagaggatagaaaaggt

SEQ ID NO: 3961 - DNA, 2488 bp, Artificial Sequence
  chemically treated genomic DNA (Homo sapiens)
aattttagggaggtggggtggagatggtggtgaggaggaggttgtggtgtgggatgtatagagttgtggtttgggtggtgtttttttgtggtggtttggtttggttttggtttttgttggggtaatgttttttggggttgtgggatgagttaggtgagtgtggagatttttagtattttttgtttggtgtgtatggatgggggtggggaggtggggtgggaagtggtgtttttggtttttgttttttggggttgtgtgattttgggtggttttgtattttttttgggtttagagttttagtattggtagggtttgtggaggttgttttgagttttggttttgtaggtattggtttggagtgttggggaggttttttggaggaggtggggtttggttttggttttggattgttgagattggttatgttgtgttgtttggatgttgggtttttttatttatagttttgtgatttttatgagtttgattttttttgtgttttagtttttttatttataaaatggagataatgtttttgtgtgttgagtttgagtgtggttgtgttgttatattattgttgttgttatgttgttaatgatggtatagtttttatggaaggggggttaaggaaggtatggggatttttttgtaggatatggggtgggtattagttttaagttatgtatataatttattttgaggttaggatttgggttttttttgtgtttattgggggttttagttgttgtttttatttttttaggttttagttttttataatgggtgtgtttttttgtttgagagggaggttttagttaagttttagtttttattgtaaaaagttatatagtaaatatttaatggattttaaatttataaaaattattttatagagttttatgaggtagggaatgttattgtatttattttgtagatgaggaaatttggggtattgatattttttagagttaatatgtaaattaggtatttggtttgagtgatagattggtgtaggtggttagtagtttaatttgtattgagtgtttattgggtttttatagtgattttgaattgtgtttttgtttatagtgatttggttggtttgggtatggtagatttagtggtgggtattgtgggtttggtggttaagagtgtgtggttattttgttttagtgaggtttatgtggaggttatgaaggaggatttggttgagtggtttaatgttttgtatggtttgggttttttgggtggtggtgatggttttttgatagggttggttatgggtatgattttgtgttaatatgttaatgttgtgattgaggttgtttgtgtattggtagttgtttgtttggtttgaggtgtggttttttaggtgtatagtgtagtgtttggtttttttatggtgtgtgataatgtggttatttttattggttggtgttgtgtggagttgggtgtgttggaggtgtttatgtttgagattgaggatttggtgttgtgtaagaatgagaagagtgtggtgttgtgtttgttggaggtggtgtggtgtggggtatgtttgggtttgttggttttatgttttgtgtagtttgagtaggagattgagtgggagttgtgtgttgtatttttagtttttaatgtttttgttgttggggaggatattattgaaattgtttttgtattagggatttttgtttgtggtttttgtatgatatttagtgatttgtgtaattttgatgagttggtgagttttttagtattaggtgttagggatttgatagtatagttagtgtttgtaatttgtttttgaattttttagggtttattttgttatttgtagaatagtttgttttataaaaagagtgtatatgttgagtattaaattgaggaatgtatatttgattttaaggaaatgggtagtttatagagagggaggtgttggggagatgatgtagtttagttgggtttgggataggatgtgggtttttggtatgatttttttttattttgtgtgttaattgtgttttaattgagtttgtgtatttttttttttggggggttgtatgattggggtgttttttttgtgttttttttgtagttagttttaggtagatgtatttataattttatggaggtttgaggttgagtgggtgttgtgatgtttggttgagatgaggtatggaaaaatttgggtaaggtgtttggtatatagtaggtgttttagggggttttgtaggtttttttattttttaggtatttttgggaagtttagttgggttgttgttgttgttgggagtagggattttgtttggaattataggatttgttttattttaagtataggtgttgttgggttttgtttttaagtttttttttttttaggatttgggtggtttttgttatttttgagggttggattaagagttttttttttattagaaggttaggattataatgtgtttgtttgggaggtagatagtggatggtagtgggt

SEQ ID NO: 3962 - DNA, 2488 bp, Artificial Sequence
  chemically treated genomic DNA (Homo sapiens)
gtttattgttatttgttatttgttttttaggtaggtatattgtagttttgattttttgataagaaggaaatttttggtttagtttttaggggtggtaggggttatttagattttgggagaggagagatttgggggtagggtttagtaatgtttatgtttagagtagaatgaattttgtaattttaaataggatttttgtttttagtaatagtagtaatttagttaggttttttaggggtgtttggggagtggggagatttgtagagttttttggggtatttattgtgtgttaggtattttgtttaggtttttttatgttttgttttaattgagtattatagtatttgtttaattttgagtttttatgaggttgtgggtatatttgtttaagattgattgtagggagggtatagaggaggtgttttgattatgtggttttttagaagaaggaatgtataagtttagttgaggtatagttagtatataaagtgagggaagattgtgttaggagtttgtattttgttttaggtttggttgggttgtgttatttttttggtatttttttttttgtgggttatttatttttttggggttaggtatatattttttggtttggtgtttaatatgtgtattttttttgtggggtagattgttttgtagatagtagggtggattttgggaggtttagggatagattgtaggtattggttgtgttgttgggtttttggtatttggtgttgggggatttattagtttgttgaggttgtgtaggttgttgggtgttatgtgggggttgtgggtaggagtttttggtgtgggggtggttttagtggtgttttttttagtggtaggggtgttgggggttgggggtgtagtatgtagtttttgtttaattttttgtttaaattgtatgaggtgtggggttagtaggtttaggtgtgttttatgttgtgttatttttagtaggtatagtattatgttttttttgtttttgtgtagtattaggtttttagttttaaatatgagtatttttggtatatttagttttatgtggtattagttgatgaaggtggttatgttgttgtgtgttatgaaggagttaggtattatattgtgtgtttggaaggttatattttgggttgggtgggtggttgttaatgtatgggtagttttggttatggtgttggtatgttggtatagggttgtgtttgtggttagttttgttaggaagttattgttattatttgggagatttaggttgtataaggtattgagttatttggttaggtttttttttatggtttttatgtaggttttattggagtgaaatggttgtatgtttttggttgttgagtttgtgatgtttgttattgggtttgttatgtttggattggttgagttattgtgggtaggaatatagtttaggattgttgtggggatttagtaagtgtttagtataaattaagttgttggttatttgtattagtttgttatttaggttaaatgtttggtttatatgttggttttgggaaatgttggtgttttaagtttttttatttgtgaaatgggtatagtaatattttttgttttataggattttatgggataatttttataaatttagggtttattaagtgtttgttgtgtggttttttgtggtggaaattggggtttggttggggttttttttttaggtagggaggtgtgtttattgtgaagggttgggatttagagaagtgaagataatggttaaggtttttagtggatatgaaaggaatttaggttttgattttagagtgggttatgtgtatggtttagggttggtgtttattttatgttttgtgggaaggtttttgtgttttttttggttttttttttataagggttgtgttgttattaatgatatagtagtagtaatagtgtaatagtatgattgtgtttgggtttagtgtgtggaggtattatttttattttatagatgaggaaattgaggtgtagaaagggttgagtttgtgaaggttgtagagttgtgggtggaggagtttggtgtttaggtggtgtagtgtggttggttttggtgatttggggttagggttaggttttgttttttttaagaagtttttttagtgttttaggttggtgtttgtggggttaggatttagagtggtttttgtaggttttgttggtgttggggttttgggtttagagagggtgtggggttgtttaaggttatatagttttggggaatagaggttgaggatgttgttttttgttttgtttttttatttttgtttatgtgtattaggtagggagtgttgggggtttttgtgtttatttggtttattttgtggttttggggagtattgttttagtgggggttggagttgggttgggttgttgtagggaggtgttgtttgagttgtagttttatgtgttttgtgttgtggttttttttttgttgttgtttttgttttgtttttttggaatt

SEQ ID NO: 3963 - DNA, 2379 bp, Artificial Sequence
  chemically treated genomic DNA (Homo sapiens)
ggttatttgtttagttatggatttttgtgtttaattatgagtttttttatatattatttattttttatttatttgtttatattttattttttgtgtagttatgaatttatttagtatttttttattatttatatttttttaattatttattagtgtttgtttattatatttgtgtatttttttatgtttttaattatttagttagtgattttttttttgttatttaaggttatttatttgtatatatagatttttatttatttagatgtatattttttggtttatttatttgtttgtttattatttattaagtataggattatttatttatttgtgggttggtgtgggtagttattatttgttttgtttatgtatgtatttattttgtgttgttttttttttgtagtaggagtgggtattgtatattattttgtttatgaagttttgagggggtattgtttggttttagttagttttatttgttttgtttttttttgtaggatagtggtgtttgtttattttttttgttagttgttagttttgttgttttttgtattttttggtaattttattgtatgaaattttttaaatttttttttatgttaagtgttaaaatagtttagtttaagtgtttttaggatttttatggagtttgattgtaaagaggtgagtatatttaagtttttatttttagtttagttttttgtattagagttttagggttgattttgtagaggggaagtagtttttttttagaggtaggtatatagtaggtgtttaagtaataggatttttgttatttttatatttttggaagaatttgtttattttttattttttgtttgtttttaaggattgttattttgaatttggtaaggtggttttttttatttttattgaatgaatgaggaaattgaggtagggtgtgggggttgggaggagaggagtattgtttgaggtttttgggggaggttagggaaattttagtttggtaggtttttgggtttttggtttttagggttttttttttaatttatttttggtttttttaaggtttttatttatgtggatgagttttttagtttgttgtagagttagttgttttgggttttgggtattaatatttttattatgtttttagtggagaagtgtagtagtgtgtggttggtgttttttgagtgggagattagggtgtggatttttttggtgtttttgttgttgtttgggtgtttgttaaaggagttggagtgtgagttttgggtgttgttgttgtagagtgaggttgtgggtgggagagtgtggtggtatgtgggtaggaagttttttttggtgtttgtttttgattttttttgttgtagttttatttttgtgttttttttggtttttttgttgttttggggtgggggtatttataggttgatggtgtgtggggtagggagtgatggtttggttttagttgggatgtgggttttgtgttgggtttggtgttgtaggagttggagttgtgttggttgtggggggagttgaatttttttaggggttttgggggttgtgggggagatgggtaggggagggtggggtgggggggggggggggtggggttgtgttttagtttagtttttatttttagttttaggtgttggtgtaggggttttgggggtggagattgggttattatgggggtgtggagaatgtgttggggtggaagggtaggttgggggatgtagtgtagagtgggagtttggggggtaggaggttttaggttgggggtttgaggttttgggtttttgtggggggtggtgggggtgtgaatggtggtgggggtgtttagggttttattatgtttaggtaggtgggtgttaggtggtttgaggggtagggtggttttagtgtggggtttagtaggttgggggagtgggtgtgtgatgggttgtggttggttttagattgttttttttatagtagtatgtggttttggagtattttttgggtttggttgggtggggatatgggggttagttaggtttgggtggttttttgaattttggggatttaaaatgatatttttgatttgagagtttaggttttattagtttgggatgattggattttttagttggaaggagttagaagttagtttattgtttaatttgtattttttatttttggtaaaggtatttttattttttatgaagagttttttttgattttttgttttttgtgttaatgtgtgtgttttgagtggggttgtttttattgtttagttttaggggtaggggtggtatttaggtttggttatttaattattttatttttttttttgtagtgataggtttaggaatggtgtttagatagaaattatgattaaagaatttagtt

SEQ ID NO: 3964 - DNA, 2379 bp, Artificial Sequence
  chemically treated genomic DNA (Homo sapiens)
gattgggttttttggttgtagtttttatttaagtgttatttttgagtttattgttgtaggaaggaggatggggtgattgagtggttaggtttgggtgttatttttatttttgaagttgggtggtgaggatagttttgtttaaagtatatatattgatgtgggaagtggggggttagaggaagttttttgtggaaaatggaggtgtttttgttaaaagtagagggtgtgggttggatggtgagttggtttttggttttttttagttagaaaatttggttgttttgagttggtagggtttgagtttttaggttgagggtgttattttgggtttttaggatttagggagttgtttggatttggttgatttttgtgtttttgtttggttaggtttgggggatgttttagaattgtgtgttgttgtggaaggagtagtttgaggttagttgtagtttgttgtgtgtttatttttttggtttgttgggttttgtgttggggttgttttattttttgggttgtttgatgtttatttgtttggatatggtgaggttttgggtgtttttgttgttgtttgtgtttttgttgttttttgtgggggtttggggttttaggtttttagtttggagttttttgttttttaggtttttgttttatgttgtattttttggtttgtttttttgttttggtgtgttttttgtgtttttgtggtggtttggtttttgtttttagaatttttatgttgatgtttgggattgggggtgggggttggattagggtgtggttttgtttttttttttttttgttttatttttttttgtttattttttttgtagtttttgaggtttttgggagagtttagttttttttgtagttggtatggttttggtttttatggtattgagtttgatgtgaggtttgtgttttagttagagttagattgttgttttttgttttgtatgttgttggtttgtgagtgtttttgttttggggtggtaggagggttgggagaggtgtgggggtggggttgtagtaggagggattgagggtagatgttaggaagaattttttgtttatgtgttgttgtgtttttttgtttatagttttgttttatagtggtagtgtttaaagtttgtgttttaatttttttggtgagtgtttgggtggtggtgggggtgttaggagagtttgtgttttggttttttatttggagggtgttaattatatgttgttgtgtttttttgttggggatgtggtggaggtgttggtgtttgaggtttagaatggttggttttatggtaagttggagggtttgtttgtgtgagtgggagttttggaggggttgggggtgggttgagaagaaggttttgggggttgggaatttggggatttgttggattgaggtttttttggttttttttgggggttttggataatgtttttttttttttgatttttgtattttgttttagtttttttatttatttagtgggagtaggaagagttgttttattaagtttaggatgatggtttttgagagtgggtagaggatgggggatgggtaggtttttttaaaagtgtggaaatggtagaaattttattgtttgagtatttattgtgtgtttgtttttgggaggaggttgttttttttttgtagagttagttttggaattttgatgtagggggttgggttgggagtaggggtttaaatgtgtttatttttttgtggttaggttttgtggaaattttgaaagtatttaaattgggttgttttgatatttgatgtggaggaggatttggggagttttatatagtgaggttgttagaaagtgtggaggatagtagggttggtagttagtagagggaatggataggtattattgttttgtaggggaaaatggggtagatggggttggttggagttaggtagtgtttttttggggttttatgggtagggtagtgtatggtgtttatttttgttgtaggagagaagtagtgtaggatgaatgtgtgtatgggtagagtgggtggtggttgtttatattagtttatggatggatgagtggttttgtgtttaatggatggtggataggtgaatgggtggattaggggatgtgtgtttgggtaggtggaggtttgtgtgtgtaagtggatggttttaaatggtggggggggggttattgattgggtggttagggatatgggaggatgtgtagatgtggtggatagatattgatgggtgattggagaggtgtgagtggtgagggggtgttggatggatttgtggttatatgggggatggagtatagataggtgagtgggggataggtgatgtatggagggatttatagttaggtgtgaaggtttatagttgggtgggtgatt

SEQ ID NO: 3965 - DNA, 2385 bp, Artificial Sequence
  chemically treated genomic DNA (Homo sapiens)
tagggaagattttttgggatttaatggtttaggtagttgtgtttttattttttgtttgggtagggaaggatttattttagttataagtagtttggagatggatggtttggtagagaaggggaaattttagtattaatttagttttaggttttattttgtagttaggtttgttttgtttagagtttttgaggggtttagtttgattttgataggtagaagagattttattttaggtttagaagtgagggagtagagtaaagggtttttggtttattgtgtgattattatttgttgttttgtttagtgggatagggatgttttgtatttagtttttttattatttaggtggtttgggggtatttaaggttttgggtagtttttgagttgggtttaggttttatggtggttttagggtaggtagggtgagagttgatagggaatagatgagggaagagtattttatatatttgggggttttattataagatttttttagtgtttttttttttttttaggttttttatttttggttatttttttaggtgatgtttgaagtttaagggattgtgtttatttttaggttagtatagtttgtgaatgttgatgaaaattggggttttttatattttttttttttggttttattttttgttgggtgtgtttgaaattggatatatatatatatatagtatatatgtgtatatgtattagttttagagttttgggggttaaggagttaggtaggtgtttgttgtttattggtatgggtttagttggatttagtttggttttttgttttttgtttttattagtttttttttgtggttattagtttttttttttttgtaattgagggattagggttttaagtagttgggtttggtttaggtttggttttgttttttgggtttttttttgtttgagttgggtgatatttttgtttgtaaggatttagttgttttaagggttttgggaggggaggttaggggtagtttaggggattagtgattatagggtaatttgtagtatttgttgggggtttagtaggtaagatgttttttgtttgttgttgtttgttatggttgtttggtggttatggttgggggtgggtttgttatgttgggaattgtttagaggttgtggttagtttgaggttttttgttttggtgagttagtttttgagtgtagattgttgttgatgatttttgttttttggggtatttgtgtggttatgtgggttgggtaggattggtatttttttttttttattgttgttatggttaggggtgggtttattttttgaggttgtgtggagaggattttaggttgttgtatgtgagtagagtagttggtgtttggtttggatttttttgttatttggggtttggtgtgtttataggttggttttgtttgttagattttgtagatgttgttttggggtttttgtgtttgtatgtagggttgagttattagttgagtggagagtggggagggatataggtggggagtagggggaggtttttgggggaattagggaggaggggtaggatagaagagaaaggggatgaagggtaatagaggaaggagaatagtgtggggataggagaggggtagggattggggaagaggagatataaggtaggatagggtagggtagtttttggaattgtggggttgttatagggatattagtttgggggagtagttaattttaggtatttgatagggatttagtgggttttggttaaggtgatttggttaatggaattggggtttttttggtatttattataagtttaggtttgtttgtgggattttattttatttgtatttagttttttttgtatatatagttggttattatttaatgtaatttttttgatattttataggtagtagtgttggtttttagggtttaaatgaaatagattttataggtgtgttttttatataggattgagtatggaatgtgtttttttttgagtttttgatttttaagtttggattgatatgtttagggaggttgtaagggtgtgttttttggattatgggtagggggtattgtgtgtagttgttgaggtttaggatgtgtgggaaagggtttggagtggaggagaagaggtttgtaggggagtggatagtttagggttgggattagtattttaatatgtatgatttgtggaagatgaggttggttgtatatagaaggtgtttatttagtgtttgttagatgttagatgttggtgtaattattataggggttatatattttttgttaggattattagtaaggtagggttattgttttatattgtttttgtagagatggagattggggattaggagtttggttttattttggtttgtagttttgggggttgttgg

SEQ ID NO: 3966 - DNA, 2385 bp, Artificial Sequence
  chemically treated genomic DNA (Homo sapiens)
ttagtagtttttaaggttgtaggttagagtagggttaggtttttgatttttagtttttgtttttgtaagaatagtgtgggatggtggttttgttttgttggtggttttaatggagggtgtgtgatttttgtggtgattatgttagtatttggtatttgatgagtattgagtaagtattttttgtgtgtgattagttttattttttatggattatgtatattggggtgttggttttagttttggattgtttatttttttgtaggtttttttttttttattttaggtttttttttatatattttgagttttagtagttgtatatggtgttttttgtttatgatttaggggatatatttttgtagtttttttggatatgttagtttaggtttgggagttagagatttagggaggggtatattttatgtttagttttgtgtgagggatatgtttgtggggtttgttttatttggattttagagattaatattgttgtttgtgggatgttagagggattatattaggtggtggttagttgtgtatatagggagggttgggtataggtgggatgaggttttatgggtaggtttgggtttatggtgggtgttaggaaaattttagttttgttgattagattgttttggttaagatttattaggtttttgttagatgtttggggttagttgtttttttaggttggtatttttgtgatagttttatagttttaagggttgttttgttttgttttgttttgtgtttttttttttttagtttttgttttttttttgtttttatgttgtttttttttttttgttattttttatttttttttttttttgttttgttttttttttttgatttttttaggggtttttttttattttttatttgtgtttttttttattttttgtttggttggtggtttagttttgtgtgtagatataaaggttttggggtagtgtttgtagagtttggtgggtaaggttgatttgtaaatatgttgggttttagatggtagaggggtttgggttagatattggttgttttgtttatatgtagtagtttggggttttttttgtatagttttgggaggtgggtttgtttttggttatggtaatggtggggaggggagaatgttagttttgtttaatttatatggttgtatggatgttttaggaggtaagaattattggtgatagtttgtatttgggggttggtttgttagggtgaggggttttaggttggttgtagtttttgagtagtttttagtatgataagtttgtttttggttatggttattagatagttatgatagatagtagtaggtaggggatattttatttgttgagtttttagtaggtattgtaaattgttttgtagttattggttttttaggttgtttttggtttttttttttagggtttttgagatagttggatttttgtaaataggagtgttatttaatttaggtagaagggagtttaaaaaatagggttagatttggattaaatttagttgtttggagttttggttttttagttgtagaaagaaagaggttggtggttgtagaaagaggttggtaggggtaaggagtaggaggttgggttagatttagttgagtttgtgttaatgggtagtaagtatttgtttggttttttggtttttagagttttggggttggtgtatatatatgtgtgtgttgtgtgtgtgtgtgtgtttagttttaggtatgtttggtagagggtggagttagaagggagggatgtggggagttttaatttttattaatatttataaattgtattgatttgagggtggatatagttttttgagttttaggtattatttggggaggtggttaagggtggaagatttggaaggaaagagaaatgttgaggaagttttatggtggaatttttgggtgtgtggggtgttttttttttatttgttttttgttagtttttattttgtttgttttgagattgttatgagatttgggtttagtttaggggttgtttgaagttttgggtgtttttaggttatttggatggtgaggaggttgggtgtggggtatttttgttttattgggtagggtggtaggtagtggttatatagtaggttagggattttttgttttatttttttatttttgggtttggagtggggttttttttatttgttagggttaggttgagttttttgaggattttgggtagggtagatttggttgtaaggtggggtttggggttgggttggtgttggggtttttttttttttgttaaattatttatttttaggttgtttgtgattggagtgagtttttttttgtttaggtggggagtaaagatgtagttatttgggttgttaggttttggaggatttttttta

SEQ ID NO: 3967 - DNA, 2452 bp, Artificial Sequence
  chemically treated genomic DNA (Homo sapiens)
gagtggagttgggtgttttaggaggatgttagtttttattaggtttttataattgtattgagaggttagttttgtttagtttatagatagggatattgaggtttaggtaggggaggtttggggtaggtaggttgtgtggtattggtggggttaggtgggtgtgtttgattgggagttattgtttgtgttttggatttgagatagtaataataatgattattataattatgagagtggtattttttaggatttaggttatagttttagtgatgatgatagtatagtatgtggtaggaatgtggtaatatttttgggtttggtttaattttgggggtatagtagttttttttggtgttttttttattgtttgtttttttagtttgaggtgggttttggttgtatagaggtgagatttgggttgttagggtgaggggattagggtttgttatttgaggggagagaaggtttagtttagattttgttttagatttttagtgttgatgtttttgttgtattttttatatgggatttgttgagtagttattatgtgttggggttttgagttgggttgaggttttggttgggggagttgtatattattgtataattgataagggtagggagtttagtaggaggatggaggtttagatagtgaggttaggttggggattggtgggagggtttggttgggttgaatattggtggaagtgtgtgtgtgtgagtgtgtatgtgtgtgtgtttgtgtttgtgtgtgtagggggtagtgttgttttttgttgtgttgtgaattgagtgtgtaattgtgtaaggagggttaaggtgtttagagaggttttttatgtttgggaggaaaatttaggatttttatagtgtgaaggagatattgttaggtgatgaaggtattttgttgtaggtgtggtgtttttggggtgtttgttgggttatattgggttttgggtttttaggggttgttttgattatttttaggaggaaatgatgggtggagttttggggttattagagaagatatagtttagagaatttgagtaagaaattttatagtttgagtttagtagttattaagtggagggaaagttttgtttttttgtgaaattaaatgaaggtagttgagtattgtgattattgtattatttttgatgtttttgttggtttttaatttagttataaattttatgggtgggggatggtataatgttttatttgtttggttatgtgatttggtagtatttggattttgtttagttagttggtaggaaaattatattttttatgattgatggagtgtgtgtttgtggggattaagaggtgggggttgtgtggggttgagttattgttgttagggtttttaatattgttgtttagtggtggtttgggggttgttttggggtttttatttattaaatttaaggggtttttgagaggggaggttgtgttggtttttgttggggagttgaaggttttgaggttgggtttagtagttgtttagtttatttttttgttttagttttgggatttgttttttgtttattgtgggtttttttgttgtagtagttagggtgggagttaggggtagggaatttttgggtattgaggtagttttggtttttagtatagttgttttttgtttttattttttttggtattatttgattgttttgttttggtagtgttttggttttttgtttttgttttttttgtggtggtttttgatttattgtttgggttttattaagtttttttagaagtggttggttttattaggagattttaggagtttaggggatgtgggtgtgtttgtagttgttttttttttgttgtttttgtatagggagttttgaggagttggagaagttggatttatttgtaggagaaagagttggggtgggtaggggagaaaggtagagaagttatagaggttgggtttataggagatttttggaggtgaaagtagaagtgaagagagattttgaagagtagtggtatttagtaggaggtttttgagagggttgtgaggggaatagaagtttttttaggggttgatgagtgtttaagaatttttttggtttatattttttgtttggatattttttagtgtgtttgaggagggttgtagagggtgtttgtaatggttgtttgggtgttaagtggtgttttattgattgggatattatatggaggttgggttatttggggattagggatttagttgggttatagttagagttataatgttggagatgttttgggttatatagttgggaggattttggagtggtaggaaaggaggtttttttttgatttttaaatgaaatttttttttatgttggttttttaattggtaaaattgaagtttaaaaaggaagttttttatttagagttatgttgtgtgttaaagagtatagtgggagtgggatggtgtttgtgaatttag

SEQ ID NO: 3968 - DNA, 2452 bp, Artificial Sequence
  chemically treated genomic DNA (Homo sapiens)
ttggatttatgggtattgttttatttttgttgtgttttttgatatgtagtgtgattttgggtgaggagttttttttttgggttttagttttgttagttgaggaattaatgtgagaggggattttatttggagattagggaggagtttttttttttgttattttaaggtttttttagttgtgtgatttaggatatttttagtattatagttttgattgtaatttgattaggtttttggtttttgggtggtttagtttttatgtggtgttttagttaatgaaatattatttggtatttaaatagttattataaatgttttttgtggttttttttgggtatattggagaatgtttaggtaaggagtgtggattagggaggtttttgaatatttattagtttttggaaaggtttttgttttttttatagtttttttaggagttttttgttgagtgttgttgttttttaaaatttttttttatttttgtttttatttttagaagttttttatgagtttagtttttgtggtttttttgttttttttttttgtttattttagtttttttttttgtgaatgaatttagtttttttagttttttagggttttttgtgtaggggtagtaggaggaagatagttgtagatatatttatattttttgagtttttggagttttttaatgaggttagttatttttggggaggtttagtgggatttaagtagtgggttaaggattattgtaggggggatagagataggaggttaaggtattgttaggatagggtagttaggtgatgttaggggaggtggaggtaaggggtagttgtgttgggggttaggattgttttagtgtttaggagttttttgtttttggtttttattttggttgttgtagtgggagggtttatggtgggtggggagtagattttagagttggggtagaggagtaagttgggtgattgttgggtttagttttaaggtttttggttttttagtggaggttggtatagtttttttttttagaaattttttgggtttggtgggtgagggttttgaggtagtttttaggttattgttgaatagtagtattgaaggttttggtggtagtggtttagttttatatagtttttgttttttggtttttatagatatgtattttattaattataagaaatgtgatttttttgttagttggttgggtaaaatttaagtgttgttgaattgtgtggttaggtaggtggggtgttgtgttgttttttgtttgtgggatttataattgagttaggagttagtaggggtgttaggagtggtgtaatggttataatgtttagttgtttttgtttaattttatggagaagtggggttttttttttgtttagtagttattgaatttagattgtgaagttttttgtttagattttttggattgtgttttttttggtgattttaagattttatttgttatttttttttgaaagtagttaggataatttttgagggtttagagtttagtgtgatttagtaggtattttagggatattgtatttgtgataaagtgtttttgttatttaatggtgttttttttgtattgtggaggttttgggttttttttttaggtgtagagagtttttttaagtattttggttttttttgtatagttgtatatttagtttatagtgtggtaggaggtagtattattttttatatatatagatataaatatatatatatatatatttatatatatatatttttattagtatttagtttagttaggtttttttattaatttttgatttgattttattatttggatttttgtttttttgttggattttttatttttgttagttgtgtagtggtgtgtagtttttttgattagaattttagtttgatttagggttttagtatatagtagttgtttagtaaattttgtgtaagggatgtagtaggagtattagtattaggggtttgggatagggtttgggttgagttttttttttttttaggtggtgggttttggtttttttattttgatagtttaggttttatttttgtatagttagggtttattttaggttaaaggagtaagtagtggagggggtattgagggaagttgttgtgtttttagggttaagttaggtttgaggatgttgttatgtttttgttatatgttgtgttgttattattattgaggttgtggtttgggttttgggaggtgttgtttttatggttgtgatggttattattgttgttgttttaaatttggggtataggtagtggtttttagttagatatatttatttggttttgttagtgttgtataatttgtttgttttgagttttttttgtttgagttttagtgtttttatttgtaaattgggtagggttggttttttagtgtagttgtgaggatttgatgggggttgatatttttttgggatatttagttttattt

SEQ ID NO: 3969 - DNA, 2482 bp, Artificial Sequence; identical to SEQ ID NO: 3495
  chemically treated genomic DNA (Homo sapiens)

SEQ ID NO: 3970 - DNA, 2482 bp, Artificial Sequence; identical to SEQ ID NO: 3496
  chemically treated genomic DNA (Homo sapiens)

SEQ ID NO: 3971 - DNA, 2499 bp, Artificial Sequence
  chemically treated genomic DNA (Homo sapiens)
gggaggggtaaagtgagagttaaggattttgttttttttgggattttattttatttttaattatattataggagaggtggatgtttagggaggttagtgagttgtttaggggtttatatttttgagtggttgtaatagtattgaatatttatagaggtttatttattatattgagttgtttggtggtattgttattttttagtatttgtaaattatgttttaggttatatagtatttttatattttagttttatgagaaaggagggtatttttatgtaatagaggttgttggggttggtagaaagtaggaataggattagaatttaggatgagaattaaaggggtttagagattttgaattagagagattttgtttaagttttagttttgtttattatgttttttgaaattttaggtaagttattgttagaggttttagtttttttatttttagtggaattggtaaggtttttttttgtttttgtgaagtttaaaatggtatataggaaaggattaatagagatgaattattattattattattattatgttagttattatttttattattggatagtgtttagaagttgaatttttttgtaatttgagggtataatgaggttttttagagaattatttgtgggtgggggagggggaggtggaaatttgttgaaaattttgttgttatttgagatttagtgtatttttttaaaatgtgtgtgatgaggatgtttttttttttggtaggtgtttgtggtagtggagatattagtgtgttataagatttttttttttttttgtgagtggtggtttaggttggggagtagttttgttttttttgtttaatatgtgtttttttaatttttagtatttttgattgtgaggattaggttagtttatgggttggtagtttggtggtgtttgagaaatggtaggttgagaagaagaaagagttgatgaaggtgtagagtttgtttaagattttagttttttaggtgtgtaaggttatgattgagaagttggagaaggagggtgtggttgggtgagttgtagaagtgggttgggtagtggggggtggggtgtgataggtagtggggggtggggtttgatagttggtttggtagaggtgggaagattgtgtggttagatttgtggtgtaaaggtttgaaggttatggaaggtggggtttgggatttattgggtgggtttattgaggtatgttttttatagttgtgtgatttggttttgatattgtttttatagtagttttggtggattttgtgtagttgtgtagtgatttattagttttggggtttttaatgttaatagtattaagtagatgttgttggattggtgttgagttaagatttgtggttatgaggtgagttttgggaggttagggggtttggaggtttttttagattttagtttaatattttttttttagtagagtttttattatttagtatattttttgttattgtgtggttttatagggaatatggaaaggtttttggggtgaggaaattgaggtttaaagaggatataaggtaagttttagattttagaattagtgatgaagtaatagggttttttgggtggtgggtagggtttaaggttggattttatttttggagttttttttttgttgttttgtaggaggttttgagttaatttttttaaatgagggaaggagtgatgaggtatgattatagttttagttgggtggtgttgggttttttagtagttttgttttttgaaattgtaaatatgggagttgataggttgatttggaggaggtttatgttttaattatttatttattgtgtaagttatggggtttttttgtgtttagtgttttaggtttggaataatagaatgttgaggggtagatagtaggggggagttgtttttaggtttttgattagtttttttatggtttatagtatgttgatatttagaattttttttttagttggagtgatgggatggttttttgtgttttggtgtataattttttttttgaggtttttgattatgggtagtttagtttttagaattgatgttagaattttgaggtggtttttttatttgtggagtaagtgtgggttttggttttgttaatgttgttgtatatttggggttggatattgggattaggtttagttgttttgagaatttttggagtgggttagttatattgttagttagtggttgagatttttttttttagagagtttttgtttttttttatttttatttttttgttgttgagtgtgttaggtgtttgttggaatgaaggagttgtaggttggtttattagtttgggttaaagtttattaggtggttttgtttatattttttttattttttttttgtttttttttttttttttttttttttttttgttttgttttttttttattattattagagttttttgtttttatgggattttggttggagattttaaaaggaggtttttggtttgggtattgt

SEQ ID NO: 3972 - DNA, 2499 bp, Artificial Sequence
  chemically treated genomic DNA (Homo sapiens)
atggtgtttgggttaggagtttttttttggaatttttagttgggattttgtgggagtaggaagttttggtgatagtgggaggagagtaggatagagaaagggagagagagggagaagggggtagagggaggatggaggggatatggatagggttatttggtgggttttggtttgggttggtaggttggtttgtggtttttttgttttggtgggtatttggtatgtttagtagtgggggggtggggatggagaaggatggggattttttggggaagggggttttagttgttgattgataatgtggttggtttgttttaggggtttttagggtaattgggtttggttttgatgtttagttttagatgtgtagtaatattagtagggttagggtttatatttattttgtagatgagaaggttattttgaagttttggtgttggttttgagggttaagttgtttatagttgaaggttttagggaagaagttgtgtattagggtatagaaggttattttattattttagttggaggagaagttttggatgttgatgtgttataagttgtaggaggattggttaggaatttgggggtaatttttttttgttgtttattttttagtattttgttattttagatttagggtattgggtataaagaggttttgtagtttgtataatgagtgaatagttggaatatgagttttttttaagttagtttgttaatttttatatttgtaattttaagggatagagttattgagaggtttagtgttatttagttaaggttatggttatgttttattatttttttttttatttagagaaattgatttagggttttttatagagtaataaggaggggattttaagagtgggatttggttttgaattttgtttattatttaagaggttttgttattttattattgattttggaatttagggtttgttttgtgttttttttgagttttagtttttttattttaagagtttttttatgttttttgtgaggttatatagtggtaggaagtgtattgggtaataggagttttgttaagaaggaggtgttgagttggggtttggggaggtttttaggttttttggttttttggggtttattttgtagttgtgagttttggtttgatattagtttagtagtatttgtttgatgttgttggtgttggggattttgaagttggtggattgttgtatggttgtgtggggtttgttagggttgttgtaggggtggtgttaggattaggttatatgattataaggggtatgttttggtgggtttatttagtggattttaggttttgttttttatgatttttgggtttttgtattatagatttagttgtgtggtttttttgtttttgttgggttaattattaagttttgttttttattgtttattatgttttgttttttattgtttagtttatttttgtagtttatttggttgtgttttttttttttagttttttaattatggttttgtgtgtttgggaggttgaggttttgggtagattttgtgtttttattagtttttttttttttttggtttgttgttttttgagtgttgttaggttgttggtttgtgggttggtttggtttttgtggttgaagatgttaggggttggggaggtgtatgttaggtagggagagtagggttgttttttagtttggattattatttgtgaggaggagggggggttttgtagtatattagtatttttattgttataaatgtttgttagggagggaggtgtttttattatatgtattttagaggagtatattgagttttaaatgatagtaaggtttttaataggtttttgttttttttttttttatttatgagtagttttttgagaagttttattgtatttttaagttataggggagtttagtttttgggtattatttgataataaaaatgatgattagtataataatagtaataataataatttatttttgttgatttttttttgtgtgttattttaaattttataagagtagggaggggttttattaattttattaaaggtgaggaaattgagatttttggtagtaatttgtttaagattttagaggatgtgatgggtggaattagaatttgaataaggtttttttgatttagagtttttggatttttttggtttttattttggattttgattttgtttttgttttttgttagttttaatagtttttgttatatgggggtattttttttttttatggggttaaggtataaaggtgttgtgtgatttgggatatggtttgtagatattgggaagtggtagtgttattaggtagtttagtgtggtaggtaggtttttgtaagtgtttaatgttattgtagttatttagagatgtgagtttttaagtaatttattggtttttttgagtatttattttttttgtggtgtggttgagaataaaatgagattttaaggagagtaggatttttaatttttattttgtttttttt

SEQ ID NO: 3973 - DNA, 2397 bp, Artificial Sequence
  chemically treated genomic DNA (Homo sapiens)
gggaggtagaggtggaggtggagttaagagtgtattgttgtgtttgttgtgttgggtttgagttggagttgggtgtgagttgtagtaggagttgtagttggagttatagttgtagttagagttgtagttaaagttttagagagtaggagttggagtgtaggttttgttggatttgtgtttagtttgttgttaggtattggttggaggatgggttgtggtgttagtttattgtttgggtgttgtgggaggtagtgagtttgtgattttttgggttgggtattgttaggtgtggagtttagattgtttttttgttaggtttggttatggttagagtatgtaggagtttttagggtttggatttgtgtgtattttaatgatttggggattgaagagaaaaaaggaatgaggattttatttaaaagtataatgtgggtattaggtgaggaggaaagtggagattatttggtatggggtagaggtgtttggagtttatgtttgagtattggagattttggtattttagtagttgtgattttggttttgttttgtttgagttggaaatatagtttagtttttagatattgttggtataggtttggtataagtaagtagtgtttttatttgtttgaaatgggatatggggttggaggaattaggatttagtttggttttaagtggaattttttggtggtttagaggttgttattggggagtttgttttttgttttagttttattggtgtggatgtgttgttgtttgttggagtattatgatggtaggatgattttagttgaagtaggagtagtagttggtggtgtttaggtggttgggttttttgagtggttttttggtagtttttaggttttttggtagtttggttgggtttgagtggttatggtagtattggtgtggttgttggtgggagttagtatgttaagttttaataagtggatttttatagtgtatggttttgggtggtttttgttgttgttggttttgtatatgttggtggtagttttggtatgttattggggggtatggtgttttatgttaggtggtatttgttgttgagttttattgtttagttttatttttggtatgtttatggtttgtggtaatgtgggtttaagggttgtgtttttggatttggtataattggttattattattatatttttgtttattttggttttgttggtgttgttgttgggttgttgttattatttattttagttggttgttatgggtttgttttgtttgggggttgtttgtagtttggttggagagttttggatattttttattggttgtggttttttgtttgtagttatttgtttttgtggatttaagttggtttagtaaagtaagtgtttgggtggttaattgagaaggtgggggtttgggtgggtgtatggtttggatggttttgtgaggggtatggttgttgttttattttataaatgaggaaattgaggtttatggttgtggaggaagtagaattgaggtttagagagggttaatagtttagtgagttttaggttttagatttaggttttggaggtttaatttgtgtttatttgtttatttatttatttagatagggtttggttttgttatttaggttgtattggtgagattttagtttaatatagtttttgtattttgggtttaagtgatttttttgttttagttttttaagtaagtgggattataggtgtatattattatgttaagttaatttttgtatttttagtagagatagtattttattatgttggttaggttgattttgaatttttgattttttaaggtgttaggattttaagtgtgagttattttatttggttagttaattttttttttttatagatatagagttttgttatgttgttaaggtaggttttgaatttttgtttttagtgattttttttttttagttttttgaagttttggaattataaattagtatttagtgatagttagtgatttgtgtttgattagttttttattttattgtattgtttttatttgatagatgaagaggtttgttttgggttatgtggttagtgagtagtagaggtaagatttaaatttagatagttagattttatgtttttaagagatgtggtttgaggttttggatataaaggaaagttagaaagtatgggttagggagagaaaaggagggtttgggatgagttgggatttggaaggttaggggttaggtttaagtttggggagggttgttgtttattgggagttatagtgtgataggtttggtgttgagtgttgattttgagttgttatggtaattattaattttatttttattttatagatgatgggattaagatttagagaagtttatgatttgataggttgggtatggtattttat

SEQ ID NO: 3974 - DNA, 2397 bp, Artificial Sequence
  chemically treated genomic DNA (Homo sapiens)
atgagatattatgtttagtttgttaaattatgaatttttttgggttttagttttattatttgtaaaatggggataaagttggtggttgttatgataatttaaggttaatatttagtattaagtttgttatattgtagtttttagtaaataatagttttttttagatttagatttgatttttgattttttaaattttagtttattttagattttttttttttttttttggtttatgttttttggtttttttttgtgtttaaagttttaggttatattttttggaagtatggagtttgattatttgggtttagattttgtttttgttgtttattggttatgtggtttagggtaagtttttttatttattaaatgggaataatatagtgagataaaaggttagttaaatatagattattggttattattaaatattggtttgtaattttagaattttaggaagttgaggggggaagattgttgaggataggagtttaagatttattttggtaatatagtaagattttgtgtttataaaaaaaaaaaattagttgattaggtggggtggtttatgtttgaaattttagtattttgggaggttaggagtttaagattagtttggttaatatggtaaaatgttgtttttattaaaaatataaaaattagtttagtgtggtggtgtgtatttgtagttttatttatttgggaggttgaggtagaagaattatttgaatttaggatgtggaggttgtattgagttgagattttattaatgtagtttgggtgatagagttagattttgtttaaataagtaaataaataaataaatatgagttgggtttttagagtttgagtttggggtttggaatttattgaattgttggttttttttgagttttagttttgttttttttatagttatgaattttagtttttttatttgtaaaatgggataatagttatattttttatagggttatttaggttatgtatttatttggatttttatttttttaattggttatttaggtatttattttgttgaattgatttgagtttgtggaggtaggtggttgtgagtaggaagttatagttggtagggggtgtttggaattttttagttaggttgtaggtggtttttaggtagagtggatttatggtggttaattgaagtgggtggtggtggtggtttagtagtagtgttgatagggttagggtgaatagaggtgtggtggtagtaattagttgtgttaggtttaggggtatagtttttaggtttatgttgttgtaggttatggatgtgttaaaggtgagattgagtagtaggatttggtagtgagtgttgtttggtatggggtgttgtgttttttggtggtatgttagggttgttattagtatgtgtagggttgatagtagtaggggttgtttaaagttgtgtattgtgaagatttatttgttgaggtttgatatgttggtttttgttagtagttatattagtgttgttatggttatttgggtttggttaggttgttggagggtttgagggttgttagggggttatttggggggtttagttgtttgagtattattagttgttgtttttattttggttgaggttattttgttattatggtgttttggtgggtagtggtatatttgtattagtgaggttagggtaggaggtgggttttttagtgatgatttttgggttattagagagttttgtttggggttaggttagattttggtttttttgattttgtgttttgttttagataggtgaggatattgtttatttgtgttaggtttgtgttagtgatgtttagaagttaagttgtgtttttagtttagatagggtagagttaaggttgtggttgttaggatgttagggtttttgatgtttaagtgtgggttttaggtatttttgttttgtgttaggtggtttttatttttttttttgtttagtgtttatgttatgtttttagatgaaatttttgttttttttttttttttagtttttaggttattagggtgtgtgtagatttagattttgggaatttttgtgtgttttggttgtgattaggtttggtaggggggtgatttgggttttgtgtttggtggtgtttggtttggggggttgtgggtttgttgttttttatagtgtttgggtagtgagttgatattatggtttgttttttggttggtgtttggtggtgagttaggtgtggatttagtagggtttgtgttttaatttttgttttttgaggttttggttgtggttttggttgtggttgtgattttggttgtggtttttgttgtgatttatgtttggttttagtttaggtttggtatggtgggtgtggtggtgtgtttttgattttgtttttgtttttgtttttt

SEQ ID NO: 3975 - DNA, 2353 bp, Artificial Sequence
  chemically treated genomic DNA (Homo sapiens)
agtaggtgtttggggtgagtgatatgataatatatggtattggtagataaagtagttgtgttagtttttgagtttttgggattttgttagatgggttgaggttgtagttttatattttaattttagtagttttaagtttgggttagggtattttgagtgggtttggttggggtggggatggggtttgagggtttaggtgtattaggtttttgttgttagttgtttaagtagataaagaggatgtttttatttgtgttatagttggttttggtttttttaaagttattgatgttggtgttgtatatttttgttgggggtggggaaggtagaatggggttagtgggttgtgagagagtatttatattattgatatagtgtttaggggagttgagtgaggtttgttttttatttatatggttattttttttaatttaagttttttatttttaggaagttttttttgtttattttggtttttatgaggtttttttgatttttttttagtaaagtagttggagaaaggtttagagaggggtagaaatgtgttttaggttatatagatggggtaagtttatgtggttagggtgtttaggggttgtttatgtgaatttagtttatgagagttagggtagtttttttttgtgtttggagggtagtaggtaggttaggatgggtttagagtaggggttgggtttggttgggtttttttttttgaggaatgtgttggttattttggtggttgggggaggggtgtagtttgggtagtatgaaagggtaaggtagggatttgggtagtggtgtggggtttgtggtgtgagagggaggggtggttagggtgtagaggaggttggtatagtttgtggtaggtttgtttgtatggtttgaggggtggttatagtgataagagtttaggaggagtaggggttttggggaaaaggtagggagggaggttttggttatattagattgaatgggtgggaattgtgggtattgggtatatagaatagtgaatgtggattattttgttttatttattttatttagtatttatggttggtataggttgggttgttgtagaagatgtagttagtggtttggttgtagttatgtagtatgatgaagtggttttggtagttaggagtgtggtagaagtagtggtggttattgggggtgaagtagtagtatttgatagggttggagtataggttatagtgtagtatttttgagtttattagtatgatggttatatggttttgagttaggtgtgtttggatgttttttatatttattgtgttgtgggtgggaggggggttagttggtgttgttgggtttttattttttattttttaaatggatttttgtttgtgtttgtttttttgttataaagtttggggattggttttttttttttttgttttgaattttttgttttgttattgtggtttaggtttagtttagagttaagtaggagattggtggggggggtgtgtgtgtgtgtttgaatgtgtataaagatgagttggttttgttaggttttttatggggagagtatttagttttaggtgggtttagttaagggttattagagtagtatatagaaattatttttttattgtattttagtttggttagtgaattttttttgtttagttttgttttttttttattttaaattatgtgtggtttatattgaaaattgttagttaagtatggtttagatatttttaaaattaaatgtttttttgaaagagttattttattttttttttaaggtttttggtggtagaaggggttgtttaggaagggttgggttatattgtttttaggggagttttagtttagtaatgatatttatttggagttttttttattggtagaaggtattgttttattttgtgttttttattaggtagtaaatttaaatgaaaatttagagtagggttgggtatagtggtttatatttgtaattttagtgttttgggaggttaaagtggaaggattgtttgagattaggaattagagattagtttgggtaatatagtagtattttgtttttataaaaatatttaaaaatttattaggtgtggggtgtggtggtatgagattgtggttttagttatttgggagattgaggtaagaagattatttaagtttggggttgtagtagtgagttgtattgtaatattgtgttatagtattatagtttgtatgatagattaagattttgttttttaaaaaaaaaaaaaagaaaagaaaagaaaatatttagagggatagagggtagatggggttgtgggtagggggagttttaggttaggggtttttgtatttttgttggaggggttgtttattt

SEQ ID NO: 3976 - DNA, 2353 bp, Artificial Sequence
  chemically treated genomic DNA (Homo sapiens)
gggtgagtagtttttttagtaaagatgtaggagtttttggtttagagttttttttgtttatagttttatttgttttttgtttttttgggtgtttttttttttttttttttttttttttttaagagatagggttttaatttgttatataggttgtagtgttgtggtgtaatattgtaatatagtttattgttatagttttaggtttaagtgatttttttgttttagttttttgagtagttggaattataattttatattattatgttttatgtttggtaaatttttaaatgtttttgtaaagatagggtattgttgtgttgtttaggttggtttttaatttttagttttaagtgatttttttgttttggttttttaaagtattgggattataggtgtgagttattgtgtttagttttgttttaggtttttatttggatttgttgtttagtggaaggtataggatggggtagtgttttttgttagtgagggaggttttaggtagatgttattgttgaattggagtttttttggaagtaatgtggtttagttttttttgggtagttttttttgttattaggagttttagaaaaaaagtaaaatagtttttttagagaagtatttggttttgaaagtgtttgagttatgtttggttggtagtttttaatgtaaattatatatgatttagggtagaggagagatagggttgggtaaaaagaatttattaattaggttggggtgtagtaggaggatggtttttgtgtgttgttttagtggtttttgattggatttatttggagttgaatgttttttttgtgaagggtttgatagagttagtttatttttgtgtatatttagatatatatatatattttttttattggttttttgtttggttttaggttgagtttgggttatagtgatagagtagggagtttagggtaaagggaaaaggagttgatttttaagttttgtaatagagaaataggtataagtagggatttatttgagggatggggaatgggggtttagtagtattagttgattttttttttgtttatagtatagtgagtgtgaaggatatttaggtgtatttggtttagggttatgtggttattgtgttggtgaatttgggggtgttgtattgtgatttgtgttttagttttgttaagtattgttgttttatttttagtggttattattgtttttgttgtatttttgattattagggttattttattgtgttgtgtggttataattgggttattggttgtattttttataataatttagtttatgttgattgtgagtgttgggtggggtgggtgaggtagagtggtttatatttattgttttgtatgtttagtgtttatagtttttatttatttaatttagtgtggttagggtttttttttttattttttttttaaagtttttgttttttttgggtttttgttattgtggttattttttaggttatgtaggtaaatttgttgtaaattgtgttagttttttttatattttggttattttttttttttatattataggttttatgttattgtttaggtttttgttttatttttttatgttgtttaggttgtattttttttttaattattaggatggttggtatattttttagaaagaaaagtttggttagatttagtttttgttttagatttattttggtttgtttattgttttttgggtatagggaagggttgttttgatttttatagattggatttatatagatagtttttggatgttttgattatatagatttattttgtttatgtggtttggagtatgtttttgtttttttttgggtttttttttaattgttttattggggaggagttagagaaattttatgaagattaggatgggtaaggagggttttttgggggtggaggatttgagttgagaggaatggttatgtggatgggaaatagattttatttagtttttttgggtattgtgttggtggtgtaggtgtttttttataatttattgattttgttttgttttttttatttttagtaggaatgtgtagtattagtattagtaattttgaggaggttagaattagttatggtatagatgaggatattttttttgtttatttggatagttgatagtaggagtttggtgtgtttaggtttttggattttatttttattttagttgggtttgtttaggatgttttggtttaggtttggggttgttggggttggaatgtggaattgtagttttagtttatttggtagagttttaggaatttggagattggtatagttgttttgtttgttagtgttgtgtgttgttatgttatttattttaagtatttgtt

SEQ ID NO: 3977 - DNA, 2483 bp, Artificial Sequence
  chemically treated genomic DNA (Homo sapiens)
taggttttttatgtggttgttggttagaagtatatttgataaggtgttttggttgttttggttgtttttatatgaagtttgtttagttaaggtatttttaggggtttaatgagaagggaattgtggttgggtgattttgaaggtgatgggaaagatgttgttttttatttataaagttgttagggttagttggggaaaagtagaggaaagggaaattataagaaagtagatttaaagaaatagaatttgaaagagttttttaggttgttgtttagaatatttggaattaagttaatgggtatggagggagagtagttgttaagttattttttggtatgagttttgagagttgtttgagggagttggagtagatgttgtgggattttttttttgagttattgtagtttttttttggagttggtttggggtggtggtttaaatatggaaatgtggtttgaattttttttttagtaattgttgttgggttttagtttttttttgtgaggtgggtagttgagtgaaatgaaattataatatttaattataatattgtgagtgttagatattgtgttgagttttgtatgtggatttttttaatttttaaaataattttagaggtggtaatgattgtatttattttatagatagaataattggttagagagggtgtgtgtgtgttatttaaggttatggagttagtaagggtattgggtgagaatttgaatttagagttattggttttttaattatagtgtttttttgttgagtagggataagtatttatttttttagttttttttgtagttagggagttagaatattttgggattggaaattgttgtttggatgattttagttagttattttgttttgtagatggggaaagtgagaattagagaaggttggtgattggtttaaggttatgttgtgttttatattttttttttatttttggatgtttagttttttaatagttttagtatagagttggggaaaaatttttagagatatttttttgggaagatagttggaaggtagggttgagttggggttatttgtgatttagtggtgaggtgatgaggtattgatgaaagtattgtattttttttttttgagaaatgttttggtattagatgagttttgggggagggaggagaggaatttggtagggatttggttataagttatttggagggtggtgtgaggattggaaaagttgttgtttgttttgtttggttttattttttgaatgaggttattgaatgtgtatgggaggtttagtgttgttttattttagtttgatggagaaattttatttgaaattttaaagtagggtagggatatttttattagatatttttgtagtttttgttttgtgggatgaagtaagggatgatgatatatttgtttgtttatttggaagtgagttttaggttattgtattagaagggtgataatttaatataagttattgttaagtaatttttgtgtgtttagtatttatatttttttgttttattttgattattatattgtataggagttattatttttattttttgtttttatttatagatgaggatattgagatttagagagttttttgttttgttttgttttttgagatggagttttgttttgttatttaggttggagtgtaatggtatgattttagtttattgtaatttttgttttttgggtttaagagatttttttgttttagttttttgagtagttgggattataggtatttgttattatatttagttaattttgtattagagatggggttttattatgttggttaggttggtttttaatttttgattttgtgatttatttgttttagttttttaaagtgttgggattataggtatgagttattgtgtttggtttgttttattttttgttttgtttgtttgttttgttttgtttttagagatagggtttggttttgttttttaggttagggtgtagtggtgtgattatagtttattgtagttttaaatttttgggtttaagtaatttttttgttttagtttattaggaattggaattataaatgtatgttattatttttagttaatattttttttttttggaaaaatgaagttttattatgttgtttaggttggttttaaatttttgggtttaagtgatttttttgtagtgttgggattataggtatgagttattttgtttggttaattttagagagttttgatgaagttataaaattttgattatggagttagaatttaaatttaggtatgtgaggtttgagtttaggtttttattagggttattgtgttgtaattgttattattttttggtattttaagtgatatttgagtattatttaagggaaatggtttatattttggtaatttttttatttgttttatttttttttttgaattagggattttggtagagatagagttttagtagtttttatttgtttttttgtgttggttttgttt

SEQ ID NO: 3978 - DNA, 2483 bp, Artificial Sequence
  chemically treated genomic DNA (Homo sapiens)
gagtaaggttgatatgaggggatgggtggaggttgttggggttttgtttttgttgaagtttttaatttagagaagaaagtggggtgggtgggggaattgttgggatatgggttattttttttgaatgatgtttgggtgttatttgaggtgttaggaagtggtggtagttgtagtatagtggttttggtggaagtttgggtttagattttatatatttagatttgagttttggttttatggttagaattttgtaattttattaaaattttttgagattggttgggtagagtggtttatgtttgtaattttagtattgtaggaggattatttgagtttaggagtttgagattagtttgggtaatatagtgagattttatttttttaaaaaggaaaaatattagttggggatggtggtatgtatttgtagttttagtttttggtaggttgaggtgagaggattgtttgagtttaggagtttgaggttatagtgagttatggttgtattattgtattttaatttggaaaataaagttagattttatttttgaaaataaaataaaataaataaataaaataaaaaataaaataggttaggtgtggtggtttatgtttgtaattttagtattttgggaggttgaggtaggtggattatgaggttaggagttggagattagtttggttaatatggtgaaattttatttttaatataaaattagttgggtgtggtggtaggtgtttgtagttttagttatttaggaggttgaggtaagggaattttttgaatttaggaggtagaggttgtagtgagttgagattgtgttattgtattttagtttgggtgatagagtaagattttattttaaaaaataaaataaaataaaaaattttttgggttttggtgtttttatttgtaaatggaggtggggggtgagaataatggtttttgtgtagtgtagtggttagaatgaagtaagaaaatgtgaatattgagtatgtgagagttgtttagtaatgatttgtgttaggttgttatttttttgatgtaatgatttgagatttatttttgggtgggtaggtgagtgtgttattattttttgttttgttttataggataaaggttgtaaaagtatttggtgggaatgtttttgttttgttttgggattttgggtaggatttttttattaggttggagtggggtagtgttgagttttttgtgtatatttagtgattttatttaggggatgagattaaatagaatgggtagtggtttttttggtttttatgttattttttagatggtttataattagatttttgttaaatttttttttttttttttttaagatttatttgatgttaaagtgttttttaaaagggggaaatatagtatttttgttagtattttattattttattgttgggttataaatgattttggtttagttttgttttttagttgtttttttaaggggatgtttttgaagatttttttttagttttgtgttggggttgttggggagttggatgtttgggaatgagaggaggatatgggatataatgtgattttgggttagttattggttttttttggtttttattttttttgtttgtgaaatgaggtagttggttgaggttatttaggtagtagtttttggttttagggtgttttggttttttgattgtagggagagttgggaagatgagtatttgtttttgtttagtaggagagtgttgtggttaggaagttagtggttttgggtttaaatttttatttggtgtttttgttggttttgtgattttaggtaatatatatatattttttttgattagttattttatttgtaaagtgggtgtaattattgttatttttggagttgttttaaggattaagaggatttatatgtagaatttagtgtagtgtttgatatttgtaatattataattaaatattataattttattttgtttaattgtttgttttatagagagaaattgaggtttagtagtggttgttgggaagaggatttagattatatttttatgtttgagttgttattttgggttggttttaggaggaagttgtaataatttaggggaaaagttttatggtgtttgttttagtttttttaggtggtttttagagtttgtgttaagagatggtttggtagttgttttttttttatgtttattagtttagttttagatgttttaggtagtagtttggggagtttttttaggttttgtttttttggatttatttttttgtagttttttttttttttgtttttttttaattggttttggtagttttataaatgaaaaataatgttttttttattatttttgaaattatttaattatagttttttttttattagatttttggaaatgttttggttagatagattttatgtagggatggttaggatagttgggatattttattaaatgtgtttttgattagtaattatatgaaaggttta

SEQ ID NO: 3979 - DNA, 2498 bp, Artificial Sequence
  chemically treated genomic DNA (Homo sapiens)
aattgttttttttattggttaggaaaagaatattttatagggaatttgataggttaatttataatagtgttaggttgtaatgttattttttaagaattttttttagtaaatatttgttatttttttaaagtaattgggagttgttgagtgtggaagtgaaaattaagttaagaagttttgttatttgggtgagtttagtttttataaaagttttgttggatgtgttttaaattgtttggtgtattttagtttttttttgtagggatttggagaaattgtgttattgttgttttatagagaaataattttttaatattttttttgttgttattttttttaagattttaaattgaaaatattttttttgatggtttttgttattatgtttggatgttttaattttaataaaatgaaataatagtgttaagttttttgagttaaatttgatattatagaggtagggattttaggatattagaattttattataatataaatgaaatataaagttttttatgtttaatagtgtattttagaaaattttgtttgagtgaattagttttgtattttataatgaaatgaggaattattgagagatatttaggtaatggattttaaatgagtgaataaggaagggaaaaattttaggaaaatgtagaaaaaagtagtggagattttggaaaaaaaattttaaagtattttttaatgtaaatatatttgattttttatagttaaataggataatagattagtttattaagttaaatgattaatgtttttgtaggttatggtttatgtgaaatattaaagaaatttgtaatggaaaatgatttgtttgaaagagttagttttttatttaaatttattaattagaattttgtattgaaaaaataaattaattgtgaatttttatggttatttttggaatttagtaattgattattaatagggattgtttataatttaattagagtgattttgtttttatatagaggggtaaattaatttttttaatttatttattttgtagatgaattatggtgtgtattaagtagatggtttgtaaatttataggtggtaaagtattgtgtaaatagttggttattaaggtagtttgtaagagtgttttggttatgggtggtgtgaagaagttttattgttattgttttggtattgtggttttgtgtgagatttgttgttattagaagtttattgagtttttaatttggaagttgttgttttagtgtttggtgtgagaaatagtttaggattttaagattgatttgtgtttttagagttttgtggtgatggtgttgtaggaggtttgtgaggtttatttggtggggttttttgaggatattaatttgtgtgttatttatgttaaatgtgtgattattatgtttaaagatatttagtttgtttgttgtatttgtggggagagggtgtgaattgttttgagtataaattttaaatttaaaggttttttttagagttaattattttgtttgtgaaaagggttgtaattttttgagatgtattagattattaaattgtattgatttaaatagatatttgaaatagtggtatttagtttttttgatgttttatttaaatttttaaatttaagtgtttttttaggtttttgtttagggttgggtttttttatgttgttttttattggtttagttggttttgttttgttgtttaggttttttgttgtttttttgtatattgtttttgttttttaaatttttggttatttaattgtattttgtttaatttatttttttgttttttggtttaatgtttttttatgtggtggtttgtattttaggttttaattgtataggtttttaatgttttggttttgtttttttttgatgtttatttgattttgtttgaggggttagtgtttttgatttgtattaggttgttttattttattagtgttttgagatttagttatttgttggtgatggttggtgttttgggtgtggttaatgttattttttgtgtgtttgatattggtttaaggttaaggttattagttggaatatttagatttgtggtattaatatatagtttttgtagatttgatagttttgtataggttttaaattgtaggagttaaagtaatgaaggtgtagatgggtgtgttttaaatttgagtgtgaaaggaaaatgtagaaattatgagtttttttaattttttagttgatattttttgtttgtttttttttttttttatttatttatttatttatttatttatttatttatttatttattttgagatggagttttgtttttgttgtttaggttggagtgtattggtgtgattttggtttattgtaatttttgttttttgggtttaagtgatttttttgttttagttttttgagtagttgggattataggtatgagttattttgtttggttttttggttgatattttaaaagaattttttaattttagtaaatattttgttttaattaaa

SEQ ID NO: 3980 - DNA, 2498 bp, Artificial Sequence
  chemically treated genomic DNA (Homo sapiens)
tttgattaagatagggtatttattaaagttgaaaagtttttttaagatattagttggaaggttgggtgaggtggtttatgtttgtaattttagttatttggaaggttgaggtaggagaattgtttgaatttgggaggtggaggttgtggtgagttgagattgtgttaatgtattttagtttgggtaataagggtgaaattttgttttaaaataaataaataaataaataaataaataaataaataaataaataagaaaagaaaaaagtaaataaaagatattaattggaaagttgaaaaggtttatgatttttgtattttttttttgtatttaggtttgagatatatttatttgtatttttgttgttttgatttttgtagtttagaatttatgtaaggttgttaagtttgtaagagttgtgtgttagtgttatgggtttaggtgttttagttaataattttagttttagattagtattaggtgtatagagagtaatgttgattgtatttaaggtattgattgttgttggtaagtagttgggttttaaaatattagtggagtaaggtagtttgatgtagattaaaagtgttggttttttgggtaaggttaaataaatattaaggaaaggtaaaattaaggtgttgaaagtttatgtagttaagatttaaaatgtaggttattatatgaaagagtgttgagttagaaaataagaggatgggttaagtagggtataattaagtggttaggagtttagaaaatgagaataatgtataagaaagtagtagagggtttgaatagtaaaataaagttagttaaattaatggagaatagtgtagggaggtttagttttaggtgaaaatttgagggagtgtttaaatttggaaatttaaatgaagtattgagggaattgaatgttattattttaaatgtttatttggattagtgtagtttagtggtttaatgtgttttaaaggattatagttttttttatggataaagtggttggttttgagaagagtttttggatttaaggtttgtatttaaaataatttatgttttttttttatgaatgtggtgggtaagttggatgtttttaggtatgatggttatgtgtttggtatgaatagtgtataggttggtgtttttgaaaagttttattaagtaggttttgtaggttttttgtagtgttattattgtggaattttggaagtgtaggttggttttgaagttttgagttattttttgtattaggtgttgaaatggtagtttttggattagaagtttggtagatttttggtagtgatggattttgtgtagagttatggtgttagggtggtagtgatggggtttttttatgttgtttgtggttggagtgtttttgtgagttgttttagtggttagttgtttgtgtggtgttttattgtttgtggatttatgagttgtttgtttagtatgtgttatagtttatttgtaaagtaaatgagttaggaagattggtttgtttttttatataggaatagaattattttgattggattgtggatgatttttgttagtgattggttgttaaattttggaagtggttgtagagatttatgattggtttatttttttagtgtaagattttgattggtaaatttggatagagaattggtttttttaaataagttgttttttgttataggtttttttgatgttttatgtagattatgatttgtaaagatattgattatttaatttaatagattgatttgttattttgtttagttataaaaaattgaatgtgtttgtgttagaaagtgttttagaattttttttttaaaatttttgttgtttttttttgtatttttttgaagttttttttttttttatttatttatttaaaatttgttgtttaagtattttttaatgattttttgttttattatagagtataaggttaatttatttaaataaggttttttaagatatattgttaagtataaggaattttgtgttttatttgtgttatagtaaaattttaatattttggaatttttatttttgtaatattgggtttgatttaaagaatttaatattattattttgttttgttgaaattaaaatgtttagatataatggtaagagttgttaaaaaaagtatttttaatttaaaattttgaaaaagatggtggtgaagagagtgttagaaggttgtttttttgtaagataataatggtgtagtttttttggatttttgtgggagagagttgaggtgtattgaataatttaagatatatttaatagaatttttataggaattggatttatttaaataataggattttttaatttggtttttgtttttatatttaatagtttttaattattttgaaaaagtaataaatgtttattggaaaagatttttaaagaatgatattatagtttaatattattgtgaattaatttattggattttttgtaaggtgttttttttttagttaataaaaagagtagtt

SEQ ID NO: 3981 - DNA, 2433 bp, Artificial Sequence
  chemically treated genomic DNA (Homo sapiens)
aagttttttgtattattgattgatgttgggtaagtaggtgtgtattttagatagatattgttagtgttgttgttagaatggtttaggtgaggttgagtgttaaggggttggtggggaatttggttttttgtgtaagttttttttgtaagtgttggtagatagggtattatgtatttttggtgttgattataggtaagtatttgtttgtaggaggttttgtttttggtttttttaatttataggtagggaattatttaataatgatttttttagttatatagtttggagaaagttgtttttttttaaaatattaaaaaatgatttataaatttaatagaaataattagagtagaattatttttatgaaatataggttttattggtaatttgagaatttatagagttgttttaattttaggatatagatagtaaataattgtttttgatattttttttaaatgtgtatatattttattttttagaatttattttttatttaggataatttataaggaattttaaaaatgtattgataaaatgatttaatttagtattattttaaaagaaaatgtaattttaattttttaaaaggggagtagtaggagaataaagggaaggggaagaaaaaggtatttatataaaatattatatgttggaaatgatgtttagtttttagaagaatattgtaagtttattttgtgtattttttttttttaaattttttatttttaaatgtttatttatttgttttttttagatattttgtggattttttttttgggttagtgtattttgtttttagtggttaaaatttatttttattataaaagaaagatgttaaattttatatttgggatagttaatatgggtttttaaatttaaatagttttttttagaaatagtaaaaaggaaaagattgtttttttttttttttaagatattattggtttgtttattattagaaggatgtttatttatgtaaaaaaaaaattaatttataggatgtaatttggagagtaggagaaagtaatttttattaaatttataaatttttttatgttagatgttagggattttttgaattgaggttgaatttttgtgttttagtggaataattattttagttggtttaaattagtttattgttaaatgtagtaaaaatgttggtaaaagttttattttttggtgtgttgaataaaaggaagtaaaaatggattaaagtaatttttaagaggagtaaggttagaggtgtggaattgttttttatgtttatgttaatgagtttttttttggatttattttaagtttatggttattattatttgttttagttgagggttggatttggatagttttttgtttttattttttgtggttgaatttttgaaattttagggtttggtatttgtgtgggttgtttatatggttgagattgggagggtaattggggaagaggtttttttgtttttgtttggtgtagaaataagtaaatttttttgttagttgtattgtttttattatgaattttgttgtattgtttatatttgaaaaatattagtaataaattaattgtagttttaagtttgtgttatttgtagatagttttttttttgttttgatgtttattttaagattttgttataatttataggttggattttgtgtttttattaaaagatagttttagagttttgtggaagagattgtattaggtattttaaattattgattttttaaagttgagttgatatggttttggtaatttttagattgtattggtaaattgagttaggatttttataattttatagttgaaaagtggttttatataattgttaatttaagatttaatagaatgagaattaattatataagattgaaaaaaaattgatgagagaaattttttttgggttatttgaaatgtagttgttttaaggttttgtttttagattgtaagaagttttttttttttttttttgtgttatttgtaatttataataagtttttaaattttgtttttataaattagaatgaagtatttttaaattatatatgatttttattaatatgattttttttatttgaatttagaaatttttatttagtttttttatattttttggtaatatagttgtttgtataggtttagtaagaatttgtttttttttttgttaaaatataattggaagtattaattatgtaatgaaagttttgttttgaatgttttatttgagaataatgtttatttaatgaggtgtgataagttattttaaggaataaaggttggttgtatttatggaattaatgtttataatgtttttttaggaaatttgatgtaggtttagtttatagtgtttagttttatagttagtaaggaaagttatttttaggtaagtatttggaggtatttttttgaaatttttagaagaaagg

SEQ ID NO: 3982 - DNA, 2433 bp, Artificial Sequence
  chemically treated genomic DNA (Homo sapiens)
ttttttttttagaggttttagaaaaatatttttaagtatttgtttagaagtgattttttttattaattgtaagattggatattataaattggatttatgttaggttttttgagaggatattataggtattggttttgtaagtatagttaatttttattttttaaaatggtttgttatattttgttaaatgaatattatttttaaatagggtatttaaggtaaggtttttattgtataattgatgtttttagttgtattttggtaaaagggaggatagatttttattaaatttatgtaaataattatattgttaagaaatgtagagagattgggtaagagtttttgaatttaaataagaagaattgtgttagtgagaattatatataatttaagaatattttattttggtttataaaagtagaatttaaaagtttattgtgaattatagatagtataagaagagaaagaaaaggttttttatgatttgggaatagaattttaaaataattgtattttaaataatttgaaaaaaattttttttattaatttttttttagttttgtgtaattaatttttattttattggattttgggttagtagttgtgtgaaattgttttttagttatagagttatgggaattttgatttagtttattggtatagtttgaaagttattaaaattatgttagtttagttttgaagagttaatagtttggagtatttaatgtggttttttttatgaggttttgagattgttttttgatgaagatataagatttggtttgtagattatagtagagttttaaagtaagtattaaagtaaaagaaaaattgtttataaataatatagatttgaggttatagttaatttattattggtattttttaaatgtggatagtgtagtaaggtttatgataagaataatgtaattgataaggaaatttatttgtttttgtgttaaataaagataaaaaaattttttttttagttgtttttttaattttagttatatagatagtttatgtaggtattgagttttggggttttagggatttagttataggaagtgggggtaggaagttgtttaaatttagtttttagttaaagtaaataataatggttgtaagtttaaaatagatttagggaggagtttattaatgtgaatatagaaagtagttttgtatttttggttttattttttttggaaattgttttggtttatttttatttttttttatttgatgtattagaaaataagatttttattaatatttttattgtatttgatgatgaattaatttagattggttaaaataattgttttattgggatataggaatttaattttagtttagaaaatttttgatatttgatgtaggaggatttataggtttagtggaaattgtttttttttgttttttagattgtattttgtgggttgattttttttttgtatgagtaaatatttttttaataatgaatagattaataatgttttaagagagaaaaagaataatttttttttttttgttgtttttggagagagttgtttgaatttggaaatttatgttggttgttttaaatatgagatttggtattttttttttgtggtggggatgggttttggttattgaaagtagaatgtattggtttggaagagaagtttatgagatgtttaagaaaggtaggtgagtggatatttagggatagaggatttaggaaaagaggatgtataaagtgagtttatagtgtttttttagaaattgagtattatttttagtgtatggtgttttgtgtggatgttttttttttttttttttttttgtttttttgttgttttttttttagaaagttagaattatgtttttttttaaaatgatgttagattagattattttattagtgtatttttaaaattttttatgaattgttttgggtgaaaggtagattttggaaaatagaatatatgtatatttaaaaaaaatattaagggtaattgtttgttgtttgtgttttagggttagaataattttgtgaatttttaaattattaatgggatttgtattttatgagaatgattttgttttaattatttttgttagatttgtgaattattttttaatattttaaaagaaagtagttttttttaagttgtgtgattagaaggattattattagatggttttttatttataaattgggagggttagggatggagttttttgtaggtaagtgtttgtttgtggttaatattaaaggtgtatggtgttttgtttgttagtatttgtagagggagtttatataggaaattaggttttttattagttttttagtatttggttttatttgggttattttgatggtagtattggtaatgtttatttgggatgtatatttgtttgtttggtattagttaataatataggagattt

SEQ ID NO: 3983 - DNA, 2461 bp, Artificial Sequence
  chemically treated genomic DNA (Homo sapiens)
attaatagtaatagtggttttaattttagataaattatttgttatttataattttatgaagaaaaatgttatgaaagataattatatatttgatttttgttattttataatttggtttatgtttttagatgtaagtaaaaatgtaaaataatatttgtattttttatttatatatattattttttatattttgtttttgtgaaaaatgttatattttaagtttatgattataagtgttaatgttgtgaattggaaattataatatattttattgtatattttattaattgtttttatttttttaataattggaagttagaaaggtttgatttttagttaaaaagtaaagtgagattgagggaagtttagagatgttatgaaggaattggtgattagagttttttgttgtttatggaatttataagaataaagatagttgttttttggaattatgattttaatttaggatttgtggagtttattttaatttggtgttgttttggaaaaggttatgttgaaaagaatttgtttttagagatttttaggaaagtagttaatttaaattgtttaattttgtgagattatttttggttggtagtaagaattttttgttatgtggggtttgtttgagagtgaagagtatttgtatatttattgtttttgaatttatatttgttggggtttatatgtatatgtatatattagtatttgggtttttatatttgttttttatattgattgtgtgaattgatttataagtttttaagtgttttagttagattaatttagtttagttttgaaagaatagataggtaagatagattgttatattttattaagttaatttttaattttataattgaggttttaataggatgtttggtttattaaggttttttattttgtttaagagtaattaaatattgttgttaattttattattaagattaagttgttgtttagtgattttttttttggttgtttttttgttttggggtttttttagtttgtttatggttaggagttgtttaaaaagttgtatttattttagttatattttgttatatttttaagtttgtggatgattttgtttgagtttttagtagttttaaagttttgttaatagtagatggaggtattatgttgagttttgtggagagaaagttttgtattgtgtaagtgatttatttggtattagagagggggaggggaagagaaattttgatgggttttagggattttttatttatttatttttttttgggatttttttttggagggtttttgtaaatatagttgttttgttatggtggaggattattaatagaaatttatgaaataaggttatgttttgtggtattttgagttagttttgtagtgtgatttattagttttttgaaaaaagaaatttgttaggatttgggttggaattgtaagatgtaaagatgttaagttgaaaaatttagggtgggtttaaatttttaattttttagttttgatttttattttgggaaaattattttagtgtaaatatttttttttatatttagtatatttgtgtaagaaaaattattttattatttaatattaataatatttattttgaattttaattttgaaaattatagaattttttaaatgttgtaaatagttgatatgggtgttttttttttgtttttaaaggaattgtttttgtaattattgagtagggtgaagttgaattttttttgtagtaaataggagagtgtgtaatgagatattttaattaaaaatattaattatatttagattaattaataatagaaaatttttaggatatttttaatgttttaaaaataaaaaagtttttattttttgaagttgttaggtttttattttagttttgagtataaataaatgtttgatatatggtttaagttaaattttaaaatgtagtaaaaatagtgtttgtatatttggtaggaatttaaattagtttaggttagtgtttttttttgtttaaagaagagtttttgtatttgtattgagttaggaaaataatataggaaaatatggggaataatatggaatattgtaagttttagtatttggttggttaaagaataatgtttggggtaattttgaaattattgtttaggttgtagtttgggtttgtataatgttttggaggattgtgagtaagatagaaagtattgattgtattgttgtaaggaaattgtttttttttttttaaagtttttattttgtaaattatttttttttagtaaaagtatattttatttgttaattttttttttgttattaatttttttaattatttttttttattattgtagaatggtttttggaataaagtagtattttaaagttttttttattaaaagtttgtttttttttttttttaaagaggtagtgtgggggtaattttttttttttttttttttttttgtgtttttttttt

SEQ ID NO: 3984 - DNA, 2461 bp, Artificial Sequence
  chemically treated genomic DNA (Homo sapiens)
aaaaaaaaaatataaaaaaagaaaggaagaaagaaaattatttttatattgtttttttaaagggggggaggggtaaatttttagtgggaaaggttttaaaatgttgttttgttttaaaggttattttgtaatgatgaagggggatgattgaaaaggttagtagtaggggaagagttaataagtaagatgtgtttttgttaagagggggtgatttgtaaggtgagagttttagaagggggaaggtaatttttttataataatgtaattggtattttttgttttgtttatagttttttaagatgttatgtaaatttaaattgtagtttgggtggtaattttagagttgttttaaatattattttttggttagttgggtattggagtttataatattttgtgttgttttttatgtttttttgtgttatttttttagtttagtgtaaatgtagaaatttttttttgggtagaaagagatattgatttgaattggtttaaatttttgttaaatatgtaggtattgtttttgttatattttggaatttggtttagattatatgttaggtatttatttgtatttagaattagaatggagatttaataattttaaaaaataaaagtttttttgtttttaaagtattaagaatgttttgaaagttttttattattaattaatttgaatatgattaatgtttttagttaagatattttattatatatttttttgtttattgtaggggaaatttagttttattttgtttagtaattataaaaataatttttttgaaagtaagggaagaatatttgtgttagttatttatagtatttaaaaaattttgtggtttttagaattaaggtttaaagtgaatgttattaatgttgagtaataaagtagttttttttgtatagatatattaaatgtaaaaagaaatgtttatattggaatgatttttttagggtgggaattggggttggggagttggaggtttgggtttattttaggttttttaatttgatatttttatattttatggttttagtttaggttttagtagatttttttttttagagagttggtaaattatgttatgggattgatttagagtgttatggggtatggttttgttttgtgggtttttgttgatgattttttattgtggtggggtaattgtgtttgtaagagttttttaggagaggattttggggagaagtagatggatgaggagtttttggagtttattaggatttttttttttttttttttttttggtgttaaatgggttatttgtatagtgtaaagttttttttttatagagtttagtgtgatatttttgtttgttgttggtaaagttttaagattgttgggaatttagatgaaattatttataggtttggaggtgtggtagggtgtaattagaatgagtgtaattttttaaatggtttttaattataggtaggttgggaaggttttaagatggaagggtagttgaggggagggttgttgaatagtagtttgattttaatgatagaattggtagtggtgtttggttgtttttgaatagagtaaaagattttaataggttagatgttttattaaaattttaattgtgaaattagaaattaatttgatggaatgtgatagtttattttatttatttgtttttttagagttggattaaattggtttaattaggatatttgaaggtttgtgaattagtttatatgattagtgtgaaaagtgggtatgaagatttagatgttggtgtgtatgtgtgtatataagttttaataggtatgaatttagaagtagtggatatgtgggtattttttatttttaagtaagttttatatgatagaaagtttttgttattagttaggaatgattttatagggttgagtagtttgaattggttatttttttgaaaatttttagaaataaattttttttgatatagttttttttagaatagtattaaattagagtaaattttataaattttgaattagaattgtaattttgaaaagtggttatttttatttttgtgggttttataagtagtaagggattttggttattagtttttttatggtgtttttgaattttttttaattttgttttgttttttagttagaaattaagtttttttggtttttgattgttggagaagtggaaatagttaatggagtatgtaatgaggtatgttgtaatttttaatttatagtattaatgtttgtagttatgaatttgaaatgtagtattttttatagaggtaaagtgtggaaagtagtatatatgagtaaggagtataaatgttgttttgtatttttgtttatatttgagagtataggttaaattatagagtgataaaagttagatatataattgttttttatagtatttttttttatagaattataaatgataaatgatttatttaaaattaaaattattgttattattaat

SEQ ID NO: 3985 - DNA, 2440 bp, Artificial Sequence
  chemically treated genomic DNA (Homo sapiens)
tttttttttttagtaatttttttattttttttttgtaggtataattttgatagtattttttttagaattttgttaaataagtggattggaataatatttagattatagatttttatgtaattttttttttttaagaaatgaattatagtttttatttgggtttggtttttttgtatttagggtttttgttattttgtattgttagaaagtaaaattttagtttgttaaggatggggaaggggttatttttgagtatttagggtgtaggtttttatttgttttttaaatagaattttagttaatatttatggatttttagttgtatattttatttttataagtatttaatgatttatgttttaaggatttttagaattttagtgttatttggtttaattttaaggtttttttaaaatagtttggggtttttattgtgttatttattatttatttttttgttttttgatttttttattaaaataaaattttgttatttttttttttttttttattaattttttaaatgtgttttttatttttttttaaaatatgtttattgttaattttggaagaaaaatgtggtaaatggtatgtttttatttttttatattgatttggaattttttttttgttttaatttggtttagtttatatttatatatattaaggttagatttaaagataaaattaattattttaattttattagttttggttaataattttgtttttatgtttttttgatttagttagtttttatgtaagttaaggtggttgagtattataagtttttattattataatgattttatatttaaatattggataggaaaaattgattatgggtttggtatttatttatatggttttatagaaagagagaaaaaaatatttttagatagtggtattaaaaaaggttgatatatattttttattattttttttttttttttgtttgtaagttattaatagttatatttaaggataaaatatttttatgtatttataattttttattagtaaagatttgattattaaataaaggtagtttgattagattatggttttatgatgggtttgagaggggttttgttttatattttggttgtatttttagtggggtttatttttaattgttttatgatttggggagatatattgttgattttattgtttagagttttttttttttttttttttgtggaatgagtgatgttttatatggaagattaagatatataataataaaatagaaatttttatgtttagttgtagttagatttatggttaagtttatggagattatttagggttgggaatatatgtttaagaatgtttttgtagttataattgtgtatggagtgagatgttgttatagattatggatagtaaatatttttgaggttgtgtgttattttttgtaggtttatgagtttttttgatttaagtaggaaggtgtttgttagtaatgtaaataaaatttagtttaatttttgatttttaatatttggaatatttatttttttggtaattgtgtggtttattgaatatttattattttagtggtttattgaagaaggattttggtttgaaaagagattgttatgggaaaaaaaaaatttaatttagagtagttattattgagaatattaaaaggatttgtgatagtaatatttttttgattttatagttggtttgtgtggattgtgttttagtgagagtttgtttttttaatgttgtgagaaaagatatagattttttttttggattttattataatataagattttttttattgtatattttaaagattttttaatttgaaaatttagttttaattttttatttttttgtatgtttttgaatggaatttaaataatttaatattgttttttttttttttttttttttagaaatggatgagagatttaagtatatttttttgatgttttgtggatatttttgtatttttatattttttattaaatataaaataaagagttttggttttgaatataagagaatataagttgttaagattattaataatttgttaatggttataggtattttggatttttttttatagtttttggggatatatttttttttaaatgttgggtagaatagtaagtgtggttaaggttgatttgagaatgaagttggaattggatgtagtagttttataatgatattaaggtttaaggttagggaagtggtaagatttttatttagtagagttaattataagttataaaagtatttaggagtagatttgagtgaagtatgtgtttagttagttattgaaataaaagtatgtagtttgttttaagtttttggtaattattttagggttgattgattaggtatttttgtgtgtatgtaattgtttttttttatttaagaataaattataaggaatagatattatatagttttt

SEQ ID NO: 3986 - DNA, 2440 bp, Artificial Sequence
  chemically treated genomic DNA (Homo sapiens)
agaagttatatagtatttgttttttgtagtttatttttaaatggagaaaagtaattatatatatatagaaatatttagttaattagttttgaagtagttattaggaatttgagataagttatatatttttgttttaataattaattgaatatgtgttttatttaggtttgtttttagatatttttatggtttatagttaattttgttgggtaaaggttttgttatttttttgattttggattttgatgttattgtgaaattgttgtatttaattttaattttatttttaagttagttttaattatatttattgttttatttagtatttgagaaagagtgtgtttttagaagttatgggaaaagatttagaatgtttgtgattattaatgagttgttaatggttttaataatttatatttttttgtatttagaattaaagttttttgttttatgtttaatgaagaatataaaaatgtaaaaatgtttataggatattaaaaaagtatatttgaattttttatttatttttgaaagagaaaaagaaaaaaaaatgatgttgaattgtttggattttatttagaggtatatagagaaataaaaagttgaaattaagtttttggattaaagagtttttaaagtgtataataaaaaaaattttgtgttgtaataaggtttaaaggaagaatttatgtttttttttatggtattaggaaaataggtttttattagagtataatttatgtagattagttgtggagttaaagggatattgttattataaatttttttggtatttttagtgataattattttgaattagatttttttttttttatggtggtttttttttaagttaaaatttttttttagtggattattggaatggtgagtgtttagtgaattgtataattgttaaagagataaatattttagatgttgggaattagaggttaaattaggttttgtttgtattattaatagatatttttttatttaaattagaaagatttatgggtttataggaagtgatatataattttagaggtatttattgtttatagtttgtaatagtattttattttatgtatagttgtaattgtagagatgtttttggatgtgtgtttttagttttaagtaatttttataaatttaattataaatttaattatagttaaatgtgagagtttttgttttgttattatatattttaattttttgtgtggaatattatttattttataagaaaaaggagaagaaaggttttgaataataaaattagtaatgtgtttttttaaattatgaaatagttaagaatgagttttattgaaaatataattagaatgtgaaataaagttttttttaagtttattataaaattgtggtttggttaagttgtttttgtttagtagttaggtttttgttagtgaaaagttgtaaatgtataggaatgttttatttttgggtgtgattgttagtagtttgtaaataaggaaggagaggagatgataaaaaatatatattaattttttttgatattattatttaaaagtgtttttttttttttttttgtaaaattgtatagatagatgttaagtttataattaattttttttatttagtgtttgaatatgaaattattatagtaatagaaatttataatatttaattattttgatttatataaaaattgattaagttagaaaaatatagaaataaaattattgattaaagttggtaaaattaaaataattgattttatttttaagtttagttttggtgtatgtggatataggttgaattaaattaagatagagaaggaattttagattaatgtggaggaatgaaggtatgttatttattatgttttttttttaaaattggtagtaaatgtattttaaaagaagataaaaagtatgtttaagagattaatgaaaaagggagaggagataataggattttgttttaataagaaaattaagaagtagaaggatgagtagtaaatgatatagtagaaattttagattattttaagaaaattttaaaattgagttaaataatattaggattttggggatttttgaaatataaattattaagtatttatggaagtagagtatatagttaaaagtttataggtattagttaaaattttgtttaagaaataaatagagatttatattttaggtgtttagagatagttttttttttatttttgatagattaaaattttattttttaataatatagaataataaaaattttggatgtaagaaaattgggtttagataagagttgtgatttattttttaaaaaaagaaggttatgtgaaagtttatagtttgaatattattttagtttgtttatttggtgaagttttagaaagaatgttattagggttatgtttgtaagaagaagatgggagaattattaggggagaaaa

SEQ ID NO: 3987 - DNA, 2334 bp, Artificial Sequence
  chemically treated genomic DNA (Homo sapiens)
attatatttttatattttatagttgaagaatttaaagttaaaaaagagtgagtagtttaatattatttagagttagttaataaagattttttttagtattttttataaagtattttatagtaaggagaaaggttttggtttttaatatagttgtatgaaaattttagttttattattttaaaggtattattttttattagtagattttttttgtgtgtaatggggttatttggataaaataaaattgatttttatttttattattaaattgggattgatgtgtgagtataaaattttagggtaatgtagtttttaattttttttatttttttatttttgtttttttttgttttagttaattgaaaaagggagttatttgtatgttgttggagggagattatttttaattgttttggtttattaatagtagatgtatagtaaagtttttaaagaaatatatgtttttaggattttatagagttttaagagtagtattttatgggtttattttggattttaggtgattaatggatgtggatgaaatttttaatttttttaattgtttgtttttgtttttttagttttttttttaagtttttttaattagttaaatttaaagtttttttgaattatttaatgttatataaaagtatttgttttaggtagagaaagagaagtaatttagttttggggtaattgatttattatatgtagggaaattttttgttagttttttaaaagttatttttttttttgttatttggaaagtatagtagttttttattttattttttattgatggaaaatagatttgtttgatgtttagaagaagttttatttgtattggtgttttatttatttatttatttttttttttggtagattattataattattggttgtgtatatttatattggatttggttattgtattatattgtatttgtaaaaatgtttttttttagatatggtaagaaaagtttttataagttgaattaatattatttgtttttttaaaatgttttaattgtattggtaaaaggagtattttttattttttaaagtttattgtaattggattgttagagtagtattattaaaaggataatgatggtgttatttttaaatagatttttttaaaataattgtttttttttattgagtgttggtatggtatttgtgaaattttgatggggttagtgggttttttgatgttgtttattagaagattgtttttttttgatttattttttttttttttgttttttttttatttatatttatgttggttttatttagttattgtaatttgtttttgtatttgaattaagttaattttttttaatgatataaataggtagtttttttattgggttagtgtttgttgtttttttattttgttttgatggaaatttttttattgtaggagttaaatattgattatgagagtgttattattttagaaattgataggttgattatgaaattataggtttgtatattttgttttttattttgggttattttaagaagttggtaatgattggtatgaatgggggtatttgatttttgttaggagggagtggattttaggttttttaggttgtttgttagggttgttattttggagttggagagggaaatgagaagtttggtttgtatgaggtttgattgaggttgtggatatgaagtaatagggaagtgaagtttatgtttttgataaaagaagatattagaaagggaggtttgaaatattaagttaaaggtgtttggtagagaattgtagagaagtaagatagagaaaagtagagagtttaaagagatttttggagatgaatgtatgtagatagagaggattttatagttatttattgtttttattttgggtaaggagaaagttgttttaagagttaatttatataggagaaaaataggagtatatatttattgttttattttatgtttaatttaaattgaggtagtttataaattaatatagaatagatttaatttttgtgttaatattgtagtttagtaatggtatatatatagttagaaagtggaaagtattagtttaatttttttgatgttgggttttagtttagttaatgttattgaattgatagattatttttttaaatttgtttaaagttattaaattaatggtttttataatgtaatataaagttattttttttttttttttgtttagaatgatattttaaatatagatggagtttttgaatatttggtttttttttaagtgatgtatggaggatggatgaaggaaaattgaaatatttttttgttatgttatttttttaatttatttgt

SEQ ID NO: 3988 - DNA, 2334 bp, Artificial Sequence
  chemically treated genomic DNA (Homo sapiens)
ataaatgggttgaaaaggtaatatagtagaaaagtgttttaatttttttttatttgttttttatgtattatttagggagaaattaagtgtttagagattttatttgtatttagaatattattttaaatggagagaaggagggaataattttatgttatattatagaaattattagtttaataattttagataggtttgaagaggtggtttgttaatttaatggtattagttaaattgaagtttgatgttaaaaaaattaagttaatgttttttattttttgattgtatgtatattattattgagttatagtgttggtatagagattaagtttattttgtgttagtttataggttgttttagtttgagttgggtataaaataaaataatgaatatgtatttttattttttttttgtataaattgatttttgaaatagttttttttttgtttagagtaagggtagtgggtggttatgaaattttttttatttgtatgtatttgtttttggaaatttttttaagttttttatttttttttgttttgtttttttgtagttttttgttagatatttttagtttagtgttttagatttttttttttagtgtttttttttattagagatatgggttttgtttttttgttgttttatatttatagttttaattaagttttatataaattaggttttttatttttttttttagttttagagtaatagttttggtaggtagtttgaggagtttggggtttatttttttttagtaggggttagatatttttatttatgttagttattgttaattttttaggataatttaagataagaagtagaatatgtagatttgtgattttatggttaatttgttaatttttgagatggtgatatttttatagttaatgtttgatttttataataaaaagatttttattaagataaaataaagaagtagtaaatattggtttaatgagaaagttatttgtttatattattaaaaaaaattggtttgatttaggtgtaaagataagttgtagtagttaaataaaattaatgtgagtgtagatgaggaaaaaataaaaggagagagagtggattggaaagagataattttttggtgggtaatattaaagaatttgttgattttattagaattttatgagtgttgtgttagtatttagtaaggaaaagtaattattttaagaaaatttatttgagggtaatattgttattatttttttaatggtattgttttaataatttagttatagtaggttttaaaaaataagaagtgttttttttgttaatataattaaggtattttggagaggtagatggtattagtttagtttatagaggttttttttgttatgtttagaaaagaatatttttgtaagtgtagtatggtgtagtagttaagtttaatataggtgtgtatagttaatgattgtagtggtttattaagaaaaaaaataaataaataaataaaatgttagtgtaaatggagttttttttaggtgttagataaatttgttttttattagtggagaatgaagtggaaaattgttgtgttttttaaataataagagaagagataatttttggaaaattaataagaagtttttttgtatgtaataaattagttgttttgaaattgggttatttttttttttttgtttagggtaagtatttttgtgtgatattaggtgatttaaaagggttttaagtttagttaattaaaggaatttggagagggagttggagaagtaggagtagataattgaaaaggttaaaggttttgtttatatttattaattatttgaaatttaaaatgaatttatagaatattatttttgaaattttgtgaggttttgaaggtatgtgtttttttggaagttttgttatatatttgttattaataggttagaataattagaaatagtttttttttagtaatatgtaaataatttttttttttgattaattagggtagaaagaagtaaaagtagaaaagtgagagaaattgaaaattatattgttttaaaattttgtatttatatattaattttaatttggtggtaaaagtggagattggttttgttttatttagataattttattatatataaaggaaatttattgataaggaatgatatttttgaagtggtagggttggaatttttatataattgtgttgaaaattaaaatttttttttttattgtaaaatgttttgtgaagggtgttgggggggatttttattaattaattttggatgatgttgagttatttatttttttttggttttagattttttagttgtaagatgtaaagatgtagt

SEQ ID NO: 3989 - DNA, 2308 bp, Artificial Sequence
  chemically treated genomic DNA (Homo sapiens)
tagtatgtattttaaggaaggaagaatagtaagggtaggaaaatagtgagtttttagggtatttggtgagtttgatataatatttgttgaataaatgaatgaatgattgatatttaaattttattgtatatatataagtattttattgagaaaatgttagtgttttgtttggattagttttaatttgtttgattttgattgtagtttttttgatagtgaaatgaggattttattatttttaattatttatggttaaagttaataaattattaaaaatttttatttagtgaattattttaatttttttattgttaaaatttttattagagttgtgatttaaggtaattgggttgagatatgttattgttaattttttagttgtatgtaggttaatgttgtatttttgtggggaaataaataaagggtatagtggttaggagtaaaaggttttttgataattagtttttgaataatttagagttgattgtattatgtaagtgtattttttaagatagggaagatgaggattatgtgtatgttttggatttttgtgttagtgtttaaattatttttattttattgtaaattggttatgtgaaaatgttaataataataatattttttattaaaatttttagagtttatgaaatttatttatattgattattttatttaatatggtttttatataattttgggaaatagtatattagatattaaatttaaagagttgaagtttaaataggttaaatggtttttttaaggttatatggtttttaagtatttgagttaagattagtattaaggttttttgatttttaatttaaaattttttttaatgtaaattgttttttagtatatttttataaaatttttttagattgtattagaataataatgtttgttaatatattatttttagatattttaatgataggatatatattttttttttgttaaaagttatttttttaagtttatatttttggggatatttaatgagtttttttttaattttgagaatttgtggttttaaaagtgtggatggtttagtaggggtaaaattttagttttgttttatagtttttgttgttatgaggtgagttgtttttttttgagggtattagagggttttatttagttaggtattgttttttaagtatgtgttttatgtgttggggtaggtttattattggattttatttatgttttggtagttagtgggtttagtggaatatttgtgattgggaatatggtgatattgtattgatttggatttttattttttttttttatagttgtatatagaattgtgggtgtagtttatttttgggtttggagaattgtttttttggttttgtttttttttttttttggagaaggggagtttttgtgttttggtggttattatagtattgattttgttttggttatatatgtgtgtatttattttttaattttgtgttgtttttttttttatagagatagtttttggtttttggtatggtttgtgatagtataggtattattatggtaatagatgtgttataaatataggataatagttttgtttttgtttttttttttttttgtttttatgtagtgaagggaattattatgatttttaaataataattatagatttttttgtagattttaggaaatgaatagaataaggttttgttatataggtaagttatgaagaaaatttataagaatattagaaaataataaaagtattgattaatattttttttttgtgtaaatatgtttttatttttttagtttgaataaatgtaaaaatttttttttttgttaatttaaaaaattatattatgaatataatttgaagtggtaaaaaatatgttagtaagaattttgaaagataggttaattaaatggtaattttgttgtaatttattttatgttagagattttagtatgggtttaattttttgagattttatttgaagatgattatgtttttaaagggtttgggtatggattgtaagaattgtgttgtagtgagtttttattaagatatttggttttttttggttttaattgagttttaaatttggttttttttaagtttgatgattgaggtaaagtatttagaagggattttgaatatatatttttgataaaggttttataatggtttttattgttttataagtgtaatagtttttggttgtattgattggttattaattttttgtagaggtagggtaggtttgggtttttttattttgttaatttttggttaaagtagttagggtagattttggtttagttgagatttaga

SEQ ID NO: 3990 - DNA, 2308 bp, Artificial Sequence
  chemically treated genomic DNA (Homo sapiens)
tttgagttttaattgggttagggtttattttggttattttgattagaagttgataaggtggggagatttaaatttgttttatttttgtagaaaattgatggttagttaatgtagttaagggttattatatttgtaaagtagtgaagattattataaggtttttgttaaagatatgtatttaaaattttttttgagtgttttattttaattattaaatttggagggaattaaatttaaagtttaattaaaattagagaaggttaaatattttaatgaagatttattatagtatagtttttataatttatgtttaagttttttaaaggtatgattatttttgaatgaagttttaaagggttgaatttatgttaaaatttttaatatgagatgaattatagtaaagttattgtttaattaatttattttttaaaatttttgttgatatattttttgttattttagattatgtttatgatgtgattttttaaattagtaaagaaggaggtttttatatttgtttaaattgaaagaataaagatatgtttgtataaaaagaaagtgttggttaatatttttattattttttaatatttttataagttttttttatggtttgtttatatggtaaagttttattttgtttattttttagagtttgtaaaaaagtttgtgattattatttaaggattatggtgattttttttattgtatgggggtgggggagggggaaagtaaaagtaaagttattattttgtatttataatatgtttgttattatagtaatgtttgtgttgttataaattatattaagggttagaggttgtttttgtggggggaaaggtagtatagagttggaagatgaatgtatatatgtgtggttagagtagggttaatgttgtggtaattattaagatatgggagttttttttttttagagaaaagggagggtagggttagaagagtagttttttaggtttagaagtaagttatatttataattttgtatgtagttgtgagaaaggagagtggaaatttaagttaatgtagtattattgtgtttttaattatgagtattttattgggtttattggttgttaagatatggatgggatttagtggtgagtttgttttagtatatgaaatatatgtttgggaaatagtgtttgattggatggagttttttggtatttttaaagagaagtaatttgttttatgatggtaagaattgtaaaataaagttaggattttatttttattgggttatttatgtttttagaattatagatttttagggttagggaagaatttattgagtgtttttaaaaatgtggatttgaaaaagtaatttttagtaggaagagagtgtatgttttgttattggggtatttggaagtagtatattaataggtattattattttgatataatttagggaaattttgtaggaatatgttaaaaggtaatttatattaaaaagaattttggattaggagttagaagattttagtattagttttggtttaagtatttagaagttatgtgattttgaaaaagttatttaatttatttgaattttagttttttaaatttaatatttaatatgttattttttagagttatatgaagattatattaaataaaataattaatgtgaataaattttataaattttaaaaattttaatgaaaggtattattattattagtatttttatatagttagtttataatgggataggaataatttgaatattaatataggaatttaaagtatatatatgatttttattttttttattttgagaggtgtatttgtatgatatagttaattttaaattatttaagggttgattattaaggggttttttgtttttagttattgtattttttatttgtttttttataggaatgtagtattaatttatatatagttagaaaattgatagtagtatattttaatttaattattttgaattataattttggtaaaagttttagtaatggaagagttaaaatgatttattagatggaagtttttgataatttgttgattttagttatggataattaagagtgatggaatttttgttttattattaaggaagttgtagttaaggttaaataggttgggattaatttagataaaatattagtatttttttagtgaaatgtttatatatgtgtaataagatttgaatattagttatttatttatttatttaataaatattgtgttaagtttattaaatattttgaaaatttattatttttttgtttttgttgtttttttttttttgaaatatatattg

SEQ ID NO: 3991 - DNA, 2496 bp, Artificial Sequence
  chemically treated genomic DNA (Homo sapiens)
attttgagttggttgtaaataaaatattttaagttattgtttttttttttatttgattgagttagttattgtatagggaggtgatataaaataaaattttgtgtttttgaagttgagattttgggattgtattttatgtaaagttatttataagttttgattattttgagagaaaaatattatagtatttttaggaagttttatgtatttgttttaaagttaagtattattttttttttagttaaaaaaaaaaaaaagtttggaaaatagtgatatgttagtataaagggaatattgttttataataagaaggaatatgttatagatatatagtatggatgaatgttaaaaatattgtgagagaaaaatgtttgaataggagagtaattattgtttgattttatttttgtggaattttagaaaaggtaaaattaatttatggtaataggaagtagattagtgattgttaggggtgatggggattggaggaggttgattgtaaaagggtagaagggaattttttagggaaatatgaaatgttttatattttaattgtggtggtgtttatattggtgtaaatatatttgtttaaatttgtgtaagtatatgtttaaaatgggtgtagttttttgtatgtaagttatattttataaagttgatttgaattgaaaaaaggggttagaaaaggttgtggttggaattttttgtgtaatttaaggttaaatagtttatttatgttagtttttatagtattgtaagttatgttttttgtgtttatatttttttagttatttttttatttgttattatttaggagattttgtattttatttgttttttttttagttttatgatttgagtaatagaagtttttggtttttaggaattttatagtttttgttagttataagtaagaatgtattttaaatttattttaaattattttttaagtaggggttttggtggttttttggaatggaggtgtggtggaagtttgagtgtgtgtgggaagaggttgggtgttttttagattattgtattatgtttttttatatttgtttaagtttttgtgtgaatattgaaataaagtgttatgaattttgtttttggtatttgttggttatagttgtggttttgggttgtatatttgttgtggttttagagtttttgagaagttattggttgggagggtgttaagaatggttggtgtatgtggtaattgagtgtttaaggggaggaggatgatttttagtgtatttattgttttttagtttttattttaattttgttataatttagagagatgtttttttggtgtgtttatagagagatggatgtgtgtttaggaatgtataatttagtgagtagtttgaatatttagatgttgggaatattgttgagtatttatttttaaagtttaagttttttatgtttagttagtgttagtttgtaagaaagaattagttgtttttaatggattatgttagttggatttggtataagtgtttttttttagaagggaggattatatgtttatagtaataagatgtttttttattttttagtttattaaaagattgtgaaatagggtgtgtagatattttaggtagtattattttttaaatagatgagtttgaaagagtgagaaaaggttgtgttaggttaattgggtttaaggaaagttaaataattggtgggagaaggaaaagtaaatattaatttttttttttgttgtgtattttttttttttttttttttttgagatggagttttgttttggttggagtgtagtggtatgattttagtttattgtaatttttgttatttgggtttaagtgatttttttgttttagttttatgagtagttgggattataggtgtttgttattatatttagtttatttttatatttgtagtagagatggggttttattatgttggttaggttggtttttaatttttggttttaagtgatttttttgttttagttttttaaaatgttgggattataggtgtgagttattgaatttggttgttttgttgtgtattttttttttttttttttttttttttttttttttttttttttttgagatgtagttttgttttgttatttagtttggagtgtagtggtttaattttggtttattgtaatttttgttttttgggtttaagtgatttttttgttttagttttttgagtagttgggattataggtatgtgttattataattagttaatttttgtatttttttagtagagatggagttttattattttggtagggttggttttgaatgtttgattttaggtgatttatttgttttggttttttaaagttttggaattataggtgtgagttattgtgattggtttttgttgtgtattttttttggatattttttggttttgtgtttgtgtaaattttgaggttttttaaaattattaaagtagtgaggagaagatggtagaaagttgtgtgttgatatttttttt

SEQ ID NO: 3992 - DNA, 2496 bp, Artificial Sequence
  chemically treated genomic DNA (Homo sapiens)
aaaaagaatattagtatatagttttttgttattttttttttattgttttggtagttttaagaaattttaaagtttatataaatataaagttaaaagatgtttaaaagaaatatatagtaaaggttggttatggtggtttatatttgtaattttaggattttgggaggttgaggtgggtagattatttgaggttaggtgtttaagattaattttgttaagatggtgaaattttatttttattaaaaaggtataaaaattagttggttgtggtggtatatgtttgtaattttagttatttgggaggttgaggtaggagaattatttgaatttaggagatagaggttgtagtgagttaagattgagttattgtattttagattgggtgatagggtgagattatattttaaaaaaaaaaaaaaaaaaaaaagaagaagaaaagaaaagaaaaatatatagtaaggtggttgggtttagtggtttatatttgtaattttagtattttgggaggttgaggtaggaggattatttgaggttaggagttagagattaatttggttaatatggtgaaattttatttttattataaatataaaaatgagttgggtatggtggtaggtatttgtaattttagttatttatgaggttgaagtaggagaattatttgaatttaggtggtagaggttatagtgagttaagattgtgttattgtattttagttagagtgagattttattttaaaaaaaaaaagaaaaaagaaatatatagtaaaggaaaaaattaatatttattttttttttttttattaattatttagttttttttaagtttaattaatttgatataatttttttttatttttttaagtttatttatttaaaaaatagtattatttaaaatatttgtatattttattttataattttttgataaattaggaaataaaagaatattttgttattataaatgtgtaatttttttttttaagaaaaaatatttgtattaagtttagttaatatgatttattaagaataattagtttttttttataggttaatattgattagatatggagaatttgaattttaaaaataaatatttaataatatttttaatatttagatgtttaaattgtttattaaattatgtatttttaagtatgtatttatttttttgtggatatattaggaaaatgtttttttaaattataataggattgagataaagattggagagtaatgagtgtattaagaattatttttttttttttaagtatttaattattatgtgtattaattatttttagtgtttttttaattaatggttttttagagattttgaaattataataaatgtgtaatttgaagttatagttgtggttgataaatgttagaagtaaaatttatgatattttattttagtatttgtatagaagtttggataggtgtgaggaagtatggtataatgatttgaggaatatttagtttttttttatatatatttaagtttttattatatttttattttagaaaattattagaatttttatttaaaaaataatttgaagtgaatttaaaatgtatttttgtttatgattaataagaattgtgaggtttttgaaagttaagaatttttattgtttaaattatggagttaggaggaaggtagatgagatgtaaagttttttaagtgatgatgaataaaggagtaattgaagaaatgtgaatataaagggtatagtttataatattgtaaaaattggtgtaaatggattatttggttttaagttatataaaaaattttaattatagttttttttaatttttttttttggtttaaattaattttatgaggtgtaatttatatataaaaaattgtatttattttaagtatatgtttatatgaatttgggtaaatatatttatattagtgtaagtattattataattaagatataaaatattttatatttttttgaaaagtttttttttgtttttttgtagttaattttttttaatttttattatttttggtaattgttgatttgttttttgttgttataagttagttttgttttttttagaattttatagaaatggaattaaataatagttatttttttgtttaggtattttttttttataatgtttttgatatttatttatgttatgtatttgtggtgtgtttttttttattgtagagtagtattttttttgtattgatatgttattattttttaaatttttttttttttttaattaaaaagagggtggtgtttagttttaaaataaatatataaaattttttaaggatattgtaatattttttttttaaagtaattagaatttataagtaattttgtataaagtataattttaaaattttggttttagaaatatgaagttttgttttgtgttatttttttatataataattggtttaattaaatggaaagaaaaatgataatttgagatgttttgtttatagttagtttaagat

SEQ ID NO: 3993 - DNA, 2472 bp, Artificial Sequence
  chemically treated genomic DNA (Homo sapiens)
taggtgtatttttgaggggtttatatggtttatatagtgggaattgatattttggatgtaatatatttattatatttgtgtaaattttttagagaaaatttaaagttagttaaaaaaatattaattaaatgggttattaaaatataataaattagttatgtttaattatatattttagaaaagattttatatttatagagatgagagtaggaatagttttaatataggtaaataatttttaaagtatataattttaatgtatagaaaaattaaaaattaattttaagtatgatattgaataagtattattttttataaaattattttttttttttattagttaaataaaattaaggttaaataaaggtttaattgattgtttgtaaatatatttaaattatttttaaaaattgaaaaatataattttagaattatagaattttatgttatttgattgattataaattatattatttgtaaatagagatggtgtattttaagttttagattaaataaatttttaaaatggttaatttttaatgattaaaaaattttaataagtgaatgaaaagtatataaaatttatgatttaaaaagaaaaaaaaaattataaagaaaaaaaaaaattatgaaaaaaaaatttaattagtaagtgaaaattatataaaatttttgatttttaaattgtatgaaggatatgaatgttaagaaaaataagatttttttgattgggaattgaatttgggttgtggtggtgagagtgttgaattttaattattagattattagggaatttgtataatgtttttttttaaatatatttgttgtgttaaaaatttgtatttaatttttttaattagtaggggatagagtattgtgtttaagttatatttattttgtttttgttttgagttttggtttttgaatttattttttgaaattgaagtaaatttttggaagtgttgggatggttttttaaggaaaaaatttatattttttaaatttaattttttttttattgttatgttggaaaatatattttggaaatttttattttttatgtaatatgtaaatttttttattaagataagtgttgtttggatgtgtattgtttagagttttgtaatttgttttattattttattaattattttagttgttttttttaaatttaagttttgtttttttttgtttttttttgttttttgttatgtggatgttaagtttttttaaatattttattaaatttaatgatagattgttattagttgagagtgttttttggtgaagagttggagtgatgtgttgttttgggtgtagagtgtgtgtttaataaatatgggtgatgaagggttatgtagttttatagtatgtggttttattttatttatttggtatatgtaggttaatgaggttgagagagttgtgggtggtatgtttagtgaaggattaggatatttgtttaaggttttaagtaagttttttaaatttattgtgtttgttatttttttattttttaaattgtgttattatttgggtaattgttttatttttttgtgttatatattagatatggttaggaaatgatgtaattattaaaggagttaagatattttatagtttagttttaatttagaaatttttataaagtagatgtagagggtagtaagatataatttaattttgaaaatgttagttgttatagttgaagaaatttgatttaagagattttgttttgttgtaagatggaaggaagtttaagtaagatataaatttgtaatgaatttgtttataatatttgttgttattgtgatttgtagttattatttattattataaaattaggtgagtttgtgtttgaattttgtttttttttttttagtagtttagagatggagtttaaattattgatatattttatttgaaaatatgtaataatatgagaataggaagatttaaaggggttattaagataataagatagaaaaattattagaagaaatttttatattttattgtattttaagtgggattttttttttttattttaaggaattttagattaagtttagtaggtggagtttttaatttttatttaaggggttgttagattttagtattagattatttggttttgaataaaaagattaagtagatattagtttaaatttgtataggtttagttataatattttatataaagtataaaagggtatggtgaaaattatttttttatttattttttttttttttttagaagtaattagtgttattagttttttttgtattttttagaaataatttatgtatatataatatatatttggtttatttttttttaattttttggttttgaaatatgttaaagtaatagaaagttgtaattatagaatattgaatatatatatattttttatttatatttttgttttttaatttagagttttagtaatttgtggttattaggtatta

SEQ ID NO: 3994 - DNA, 2472 bp, Artificial Sequence
  chemically treated genomic DNA (Homo sapiens)
tagtgtttaatagttataaattgttggagttttaaattggaaggtaaaggtatggatgaagggtatatgtgtgtttaatgttttatagttgtaattttttgttgttttgatatgttttgaaattaaaaagttggaggaaaatgaattagatatgtgttgtatgtgtatagattatttttgggagatatagaagaagttggtaatattggttatttttgggaagaagaaaggagtgagtaggaggatggtttttattatatttttttgtattttgtgtaaaatattgtgattaaatttatataaatttaaattaatatttgtttaatttttttatttaaaattagatggtttaatgttgaggtttagtaattttttaagtaagagttaagagttttatttattgaatttgatttaagattttttgggataggaaaaaagggttttatttaaaatataataaagtgtagaaattttttttgatgatttttttattttattattttaataatttttttaaatttttttgtttttatattattatatatttttagataaagtatattaatgatttaaattttatttttgagttgttgaaaaaaaagaaatgagatttaagtataggtttatttaattttgtggtaatggatgatgattgtaagttatagtggtggtggatgttgtgagtaagtttattataaatttatgttttatttaagtttttttttattttgtagtggagtgaagttttttgggttagatttttttaattataatggttgatatttttaaagttgagttatattttattgttttttgtatttattttatgagggtttttgaattaaggttgggttgtaaggtgttttgatttttttggtaattgtattattttttggttgtgtttagtatataatgtggagaagtgaagtaattgtttagataataatatagtttggaaagtaggaggataataaatatagtgggtttgaaggatttgtttggagttttgggtagatgttttgattttttattaggtatattatttatagtttttttagttttgttagtttgtgtgtgttaaataaataaaatagaattgtgtgttatgaggttatgtgattttttattatttatatttgttgagtatgtgttttgtatttaggatagtgtgttgttttggttttttgttgagaaatgtttttagttggtggtaatttattgttagatttagtaaaatgtttagagggatttaatatttgtgtgatagagaatgaagaaagatggagagggatagaatttagatttggaaagagtagttaaaatggttaataaaataataaagtaaattataaggttttggatagtatgtgtttagataatatttgttttggtaaagagatttatatgttatgtaaagaatgagaatttttaggatatattttttagtatggtaataggaagaggattagatttggagggtataggttttttttttaaggggttattttggtgtttttgagaatttgttttaattttaggaaatagatttagggattaggatttagaataagaataaagtgggtgtggtttagatgtaatattttattttttattggttagaggaattaagtgtagatttttaatataataaatatatttaggaagaagtgttgtgtaagttttttggtggtttagtggttaggatttggtgtttttattgttgtggtttgggtttgatttttggttagggaagttttgttttttttgatatttgtattttttatgtaatttagaagttaagagttttgtgtagtttttatttgttggttgggttttttttttatagtttttttttttttttatagttttttttttttttttaaattataagttttatgtattttttatttgtttgttggggttttttaattattaaaaattgattgttttaaaagtttatttaatttaaggtttaaaatatgttatttttatttataggtaatgtaatttataattaattaaataatataaagttttgtgattttaaaattgtattttttagtttttaaaaataatttggatgtgtttataagtagttagttaagtttttgtttaattttgattttgtttgattaataaaagaggaagatagttttatgaggaataatatttatttagtattatgtttagagttaatttttagtttttttgtatattaagattatgtattttggagattatttgtttatattggagttatttttatttttatttttataaatatgagattttttttgagatgtatggttggatatagttagtttattgtgttttaataatttatttagttaatgtttttttggttaattttaaattttttttaagagatttatataaatatggtaaatgtgttatatttagagtattaatttttattatataaattatataggttttttaaaaatgtattta

SEQ ID NO: 3995 - DNA, 2241 bp, Artificial Sequence
  chemically treated genomic DNA (Homo sapiens)
ttttaaaggaaatgttagttttgaaatttttttttagagttagagttagatattggtttttagttgtttaaagatatatatatagtaaatagtagtattaatttttatttgttatttaaattttaaagtaattatttttttgttatatttttagagtagatgaagtagagaatgtgaattgggggaagatattttggatgtttattttgtgggtattattagttgttttgaggaagtagtatgagattttgggaagtaattgtagtattaattagattttttagatgtttttgaatatttttatttttgtgttagaaggaaaagagttttttggaatttgattattttttgtagtttttgtagttgttgtgtttgaggagtagaggatggagttgggataaagtttagttgtaggagttataaggaaaatatatttttttttatagggttttgagtaattttgtgaggaaaaaaaggtttttaattttattttatttgaatatttttagggattatataattggataattatggaattggaagattttttagatgtttgattttttagttttgtaggtaagagaattaagatttaaagagggtaaagaattgtttgattgtggagttaagtttgtgtaggggttgatgatttagtttttattgatttttgaataatttttatttagaaaagagttttaattggtaaatataggaatttgggttttttattatgttatgttatgttatgttatgttttgttgtgttatgttatattattatattatgatttatgttattataatgtttgattgttgaaagtaaataaaatattatttttggggttgtttttatagtttagagtttatataataattaatatttgtttttttaataatagagttatttttttttttttttttaaaaaagttttttgtggtattaaatattaagtagagtttaaataagaagtagagtgttatggtttttaaaatgtggttttttttttttgttaatatttgttttagagtgtatatataggtttttgttagagatatttgtttgttgggtttttatgtaaatggtagattgaagggtagtgtgattgttttagtttttaatgttgtattatatattttgagtttttggttttttattagattttaaggaatgattttatgttttgtggtttggggttttatgtatttagttttgtttgttttttttgttttttttttttagttaggttttttattatttagtttgtttttttttgtttattgagagagtgaatgtattttttttttgtttttatttttgtaaaagttattttttaaaatgttttattatgatagattattttatgtttttgtaatgaaatagttgaattttatattttttgttattttgttaatattattagaattatattaatgagaattggtaaaataattttatttgtttaattttagtattagtataaatttagagggttttgtttttttttaataatttgatataatttaattataagttaaattattgattttgtttttatttaaatagttttaattattgttataaatgataatttatttaagattgatagtttaaaggtatagttagttatttttatagaaatttttattttattttaaagttatggtgaattgatatttttttgagaattgtttatgtttttttgtttttaattattataatttttattttagatttagtgagtatatgtgtaggtatgttatatgggaagattttgtgatgttgaggtttggggtatggatgattttatgatttagtaggtagtattttagttttttatttttttgtttttttttttttttagtagtttttggtgtttattgtttttattttttttttatgtgtatattatgtttagtttttatttataagtgagaatatgtggtatttggtgtttttttttagttttaatttgtttaggatgatagtttttagttgtatttatgttgttgtaaaggatatgattttgtttttttttatggttgtatagtattttatggtgatgtattatatgttttttatttaagttattgttgatgggtatttaggttggtatttaggtatgatagattgattttatgtttttgttattgtgaatggtggtgtgatgaatataagtatatgtgtgtttatggtagaatgatttatttttttttgggtttatatttagtaatgggattgtta

SEQ ID NO: 3996 - DNA, 2241 bp, Artificial Sequence
  chemically treated genomic DNA (Homo sapiens)
tagtaattttattattgggtatagatttaaaggaaaataaattattttattataaatatatatgtatttatgtttattatattattatttataatagtaaagatatggaattaatttattatatttaggtattaatttaggtatttattaatagtggtttggataaagaatatgtggtatattattatggaatattatgtagttgtaaaaaagaataaaattatattttttatagtaatatggatgtagttggaggttattattttaagtaaattaagattggaagaaaatattaaatattatatgtttttatttataagtgagaattaaatatggtgtatatatggaaaaaagatgaaagtaatggatattggggattgttggagagggaagagagtaaggaggtggagggttgaggtattgtttattgggttatgggattatttatattttaaattttagtattataaagtttttttatgtgatatatttgtatatgtatttattgaatttaaaatagaagttgtaatgattaaaaataaaaaaatataaatagtttttaaaagagtattaatttattatgattttagggtaaaataaaaatttttataagggtaattggttgtatttttgaattgttaattttaaatgggttgttatttgtagtaatagttggagttatttaaataaaggtaaaattaataatttaatttgtaattaaattgtgttaggttgttaaaaaagagtaaaattttttgaatttatattaatgttgagattaagtaaatgaggttattttattaatttttattaatgtagttttgataatattaataagataataggaaatgtgagatttaattgttttattgtaaagatataaaatagtttattatagtgaagtattttaaaggataatttttgtagaaatagagataagagaaggatatatttatttttttagtgaatgggaaagagtaggttgagtggtgagaagtttgattggagggagagaataggaaaagtaagtagaattaaatatgtaggattttaaattataagatatgaagttattttttgaggtttaatagagaattaaggatttagagtatgtgatatggtattaggaattagaataattatgttattttttaatttgttatttgtgtaagagtttagtaggtgaatgtttttggtaaagatttatgtgtgtattttgggataagtattgataagagaggagaattatattttagggattataatattttgttttttgtttaagttttatttaatgtttaatgttatgaggaatttttttagaaaaggaaaagaaagtagttttgttgttggaaaagtaggtattaattgttgtgtgaattttagattgtgagaatagttttagaaatgatattttatttgtttttaataattgagtattataatagtatgaattataatgtggtaatgtaatataatataataaaatataatatagtataatataatatggtagagaatttaaatttttgtgtttgttaattaagatttttttttaaatgaaaattatttaaaaattaatgaagattaaattattagtttttatgtaaatttggttttatagttgggtaattttttattttttttggattttaatttttttgtttataaaattagagagttagatatttgaggaattttttaattttataattgtttaattgtataatttttagaaatatttaaataaggtaaaattagagatttttttttttttatagaattatttaaagttttatgaaaggaaatgtgttttttttatagtttttgtaattagattttgttttagttttattttttgttttttaggtatagtagttgtaaaagttgtagaaagtggttgggttttaaaaagtttttttttttttagtataggggtgagaatatttaagagtatttggaaagtttggttagtgttgtagttgttttttagggttttatgttgtttttttagagtagttaatgatatttataaaataagtatttaagatgtttttttttagtttatattttttgttttatttgttttaagggtgtgatagagaaatggttgttttaggatttaagtggtaggtgaaaattagtattgttatttgttatgtatatatttttaagtagttaaaaattaatgtttaattttaattttggaagaaagttttaaggttaatattttttttaaga

SEQ ID NO: 3997 - DNA, 2395 bp, Artificial Sequence
  chemically treated genomic DNA (Homo sapiens)
ttatggttttgaggatttttaaagtagggatttttatattgataaaaataattttttagtgtttttgtggaggaggtgaggtaaatgataaattgatatttattttgttttaaattaagtgttaaagtttggttttttaaagagaatggttagtattttgggtgtagttgttaaatttttttaatttatatagatgtaatagaatttgtgaattaatttgtggtatttattaaagttaatttttgttaaaaataaatttttttttttttggtatattgaataagagatagggatgtattaaatatttatgaagatattttaagagagttttaggtaataggaagtgttttgagattgatttgttatgttttgagtgtatagaagatagagggagatatatagggaatgtttttgagattttttttttttaattatttttttttgtgatttttattttataatttatttttaaagaggtattatagttttttgggtgttataataaaatttaaaataaatgtttttatttagataagtattattaaaaggaaaggatattgaatttatttgaatatatttatagaagattgatttttttaagggaatgtatttattttatttttttaattatttttgaagttttgtttattaattgataattttttatagaaaggaagtaaaatagtttggtttttgtgatagtgaagaattataatattagaataaaaataggtttgttattttttttattttttttaatgtttgagttattgggagttagaaatataataattttattttagtaatatagttatttagaatatgttaaattgaaaggtaaatttaaagttaaatttttttattttttgaagattagtatatttatttttaattataagtatttagtatgattagttataaaatattagagaaaatatggttatatttattttatttttttaattgattattatttgattagaaagaagattattttgttttatatgatttatttttagtaaaaaaattgtttatttaagtataggaaagttaatttttgtattaaaagagaattgagaaatttaaatagtttatgatttttattgttttggtttttgttgtaaagtgttattgtgaaaaattggttttgattttagtaattaatgtttttttattgtatagagatggtttggtgttattgtgttattgtggttgttaagggtagggttttttagtaatgtataatggttagaataagttttttttaattttgtattaagggtaggtttttagttttaaattatttttttattttattttagtttttttttgggagttgtggtttttttttgtggttgaatgtggtttagttttttttgaattttgtttttttttaaaaataattatttgttggagagtggtggtggttggataatattgtgaatgtaaaatattattgaattgtgtatttaaatgggaaattttatgttatgtgtattttattatagaaattatttttaatgtgtatttttaggtagttgagaggttgtttttttagaggattttgagttgttttttttagtaggtttattatttttgtatttttgtatgttaataaagattttttttttttttttttgagatggagttttgttttattgtttaggttgaagggtagtggtgtgattttggtttattgtaatttttgttttttaggtttaggtaatttttttgttttagttttttgagtagttgagattataggtatttgttaatatatttagttaatttttgtatttttagtagagatagggttttgatatgttgattaggttggttttaaatttttgattttaggtaatttatttattttagttttttaagtgttgggattataggtatgagttattgtagttggttaataaagattttttgtgttaattatagatatattaaatgaaattgtttttttttgtttttttttttttttattaagggatgaaatataatttttttttttttgaatttatgtagatttatgatatatttgatattaattaaatgtagtagatatgatgttggataatttttgaggtttaatgattataagtaattaatttatttttttttttatttgtttgaatttttatattggatttttgaattgtaattgtagtagtttaattgttttgtagttattatgttgtaagaaagtttagattaaagtatataaggaaattaatggagaaatattaagattatatgaagagttatggagaggtgtagttttttgttttagtttttgttgttgtttgattgtaatttataaaatttatagttagaattatatagttaaatttttttttaattttagattggttgaaattatgaggta

SEQ ID NO: 3998 - DNA, 2395 bp, Artificial Sequence
  chemically treated genomic DNA (Homo sapiens)
tattttatggttttagttagtttggaattggggaaggatttgattatgtagttttagttgtgggttttataagttgtagttagatggtgatggaagttggaatagagggttgtatttttttgtggttttttatgtagttttagtgtttttttattggtttttttgtgtgttttagtttgggtttttttgtagtatggtggttgtagggtagttgaattgttgtaattgtagtttagagatttagtgtgggagtttaagtaagtgagaaagaggatgaattaattgtttgtaattattgagttttagaagttgtttagtattatatttgttatatttgattggtgttaagtgtgttataagtttatatagatttaaggagaggaaaattatattttattttttgatggagaagggaaagggtagaaagggataattttatttggtatatttgtgattagtataggaagtttttgttggttagttgtggtggtttatgtttgtaattttggtatttgggaggttgaggtgggtggattatttgaggttaggagtttgagattagtttggttaatatgttaaaattttgtttttattaaaaatataaaaattagttgggtgtgttggtaagtgtttgtaattttagttatttaggaggttgaggtaggagagttgtttgaatttgggaggtagaggttgtagtgagttgagattgtgttattgttttttagtttgggtaatagagtaagattttattttaaaaaaaaaaagaaaaagtttttgttagtatgtaaagatatagaggtggtggatttgttgaaaaaggtagtttagggttttttgagaagatgattttttggttgtttgggaatatatattagagataatttttgtagtaaaatatatatagtataaaattttttatttaaatgtataatttagtggtattttatatttataatgttgtttaattattattattttttaatagataattatttttgggggaggatagggtttaggaaaagttgaattatgtttaattatagaaagaaattatagtttttgaagagaaattggaataagatggggaaatgatttgggattgggggtttgtttttagtgtagggttggggaggatttgttttggttattatgtattgttaaggaattttgtttttagtagttataatggtataatgatgttaggttatttttgtgtagtgggaaagtattgattgttgggattaggattaattttttatagtgatgttttgtagtagaggttaaagtaatgaagattatgggttgtttaaattttttagtttttttttagtatgaaggttggtttttttatgtttaagtaaatagtttttttgttgagagtaaattatgtgaaataaaatggttttttttttaattaggtgataattagttgaaaaaataaagtgaatatgattatattttttttaatgttttataattaattatattggatgtttgtagttaggaatgagtatattgatttttaaaaaatagagaaatttgattttgaatttattttttgatttaatatattttgaataattgtgttattgggatggggttattatatttttgatttttagtaatttagatattagaagagataaggaaagtgataaatttgtttttattttagtattataattttttgttgttatgaaagttaggttgttttgttttttttttgtaagaaattgttagttgataggtaaaattttaagaataattaaagaaataggataggtatatttttttgggaaaattaattttttgtaaatgtatttaaatgaatttagtattttttttttttaatagtgtttatttaggtgaaaatatttattttagattttgttatggtatttagaaaattatgatgtttttttaaaaataaattatagggtaaaagttatagaggaggatgattgaaaagaaaaagttttaggaatattttttgtgtgtttttttttgttttttgtgtatttaaagtatggtaaattaattttagaatattttttgttatttgagatttttttgaagtgtttttgtaaatgtttaatgtatttttattttttatttagtatgttaggaggagagagatttgtttttggtaggggttggttttggtaaatgttataggttaatttataggttttgttgtatttgtgtaaattgggaagatttgatagttgtgtttaaaatattggttattttttttgggaagttagattttgatatttggtttaaggtaaaatgaatgttaatttgttgtttattttattttttttataaaaatattaaaagattgtttttattaatataaagatttttgttttgagaatttttgaagttatag

SEQ ID NO: 3999 - DNA, 2258 bp, Artificial Sequence
  chemically treated genomic DNA (Homo sapiens)
agttaagattgtgttattgtattttagtttgggtgatataaattttgttttaaaaaaaaaaaaaaaaaaaagaagaaattttgtgtttttttttttgatatagtgtttagggaattagtaagattttattaatataagtattatatttttttatttttttgtaaaattattagtagtaagtgtttttttttaatattaaaatatatttattttggttgtgtatggtggtttatgtttgtaattttagtattttgggaggataaggtaggtggattatttgagtttgagagtttaagattagtttgggtaatatggtgaaattttgtttttataaaaaaaaaaaaatataaaaaattagtagggtgtggtggtgtatatttgtggttttagttatttgggaggttgaggtgggaggattgttggaatttttgaggttgaggttgtattgagttgagattgtgttattgtattttagtttgggtgatagagtgagattttgttttaaataaataaataattgaaagttaattatatttttgtttatggaattttttattttatataagttgagagaagttaaatttgggttattgaaatgttttagaaaattgttaaattgtttatttttttaagtttttagtttgttttagttatatgtgtgtgtgtatatatgtgtgtgtgtatgtgtgtgtgtgtatatatatatatatatatatatatatatatatatatatatgtatgttattgtattttaattttggtaatagagtgagaatttgtttttaaaaaatagtaaaaaataagttaataataaaataagttggttaggtgtagtggtttatgtttgtaattatagtattttgtaaggttgagatatataataatgtttaagagtaaaaattaagtaaatagttataatatgattagttattttatttattttattttgttggattggagtttgttgttatattatataaaatatttgttaggattttgtatttttaatatttatgtatatttatgggaatttattagagggggaagtttggatttaaaatttttttttatgaaatagttaaagattaagaggtgaattgtgtgggatatgaagtatgttatggttgagttgttgatgaggttttggttgtgttttgtattatgtaagggtttagtattttgagaaggtgtttggtaaatgttattggttgattggatggtagtttttggaaggtttgttgattagaaatagagtttttggtagaattttaatggtaaagttataaatagtaatagtttttaaaataataattgtaattttagtaaaatgaaaattttttatgtgggaggtataatgggaaatgtattgattggtatttttttttagatatatgaatagtgattataagtagagatgttttttttttttataaaggaaaaggtgtaaaatattggttttataatgtaggaaaattaataaaatggtggtataaaatattgattattattagtagatttttttagtaagaatggtagtttaagttaatagatatgttttatgaattttgtggttgtaagtggttggaatggaatgaaaattagtttttatgaatttatttttttattttttttattttaatgagtatttattgtatgttaggtattgttttaggtatgtgtaggatattagtgagtttagttaagattaaattttttttgtttagatatagaaaataagggatatatattatataaaaatatataatatgttagaaagtggaaaaagtaagtagaaaaaagaaaaagtatagtagtaagggaaatttaagagtgttaggttgggtgtggtggtttatgtttgtaattttggtattttgggagtttaaggtgggtggattatgaggttaggagattgagattattttggttaatatggtgaaattttgtttttattaaaaatataaaaaattagttgggtgtggtggtgggtgttatatgggaagttgaggtaggagaatggtgtgaatttgggaggtggagtttgtagtgagttaagattgtgttattgtattttagtttgggtgatagagtgagattttgttttaaaaaaaaaaaaaaaaaaagagtgttaaaaaatggtgggtatggagtaggggtattaggtgggtagaggtagttttgttgagatggtgataagtgaatagagttttggagtagaaaattagtggatgatgggggaagagtattttgggtaaagg

SEQ ID NO: 4000 - DNA, 2258 bp, Artificial Sequence
  chemically treated genomic DNA (Homo sapiens)
tttttatttggaatgttttttttttattatttattggttttttgttttaggattttgtttatttattattattttagtagagttgtttttgtttatttaatgtttttgttttatgtttattattttttggtattttttttttttttttttttttgagatggagttttgttttgttatttaggttggagtgtagtggtgtgattttggtttattgtaagttttgttttttgggtttatgttatttttttgttttagttttttgtgtagtgtttattattatgtttggttaattttttgtatttttagtagagatggggttttattgtgttagttaggatggttttgattttttgattttgtgatttgtttattttggatttttaaagtgttgggattataggtgtgagttattgtgtttggtttggtatttttgaattttttttgttgttgtatttttttttttttttatttattttttttattttttaatatattatgtatttttgtatgatgtgtattttttattttttgtatttgagtagagagaatttaattttggttaggtttgttgatattttgtatatatttagaataatgtttagtatgtagtaggtgtttattaaaatgagaagaatgagagaatggatttgtgaaagttgatttttattttattttagttatttgtaattataaaatttatgaaatatatttattggtttgaattgttatttttgttagaagaatttgttgatggtgattaatgttttatattattattttattggtttttttatattgtaaaattaatgttttatatttttttttttgtagaaaaggggagtatttttatttgtgattattatttatgtatttggagaaaaatattaattaatatattttttattatattttttatatagaaggtttttattttgttgaggttgtagttgttattttagggattgttattgtttgtgattttgttattgagattttgttaaaggttttgtttttgattagtaggttttttgagaattgttgtttgattagttagtggtatttattaggtatttttttagggtgttgagtttttatatgatgtaaagtatagttgaggttttgttagtagtttagttatgatatgttttatattttatatgatttattttttgatttttaattgttttatggagggaaattttaaatttaggtttttttttttaatgaatttttataaatgtgtatgggtgttaaaaatataaaattttagtaaatgttttatatgatataatagtagattttaatttagtaaaataaaataaataaaatgattaattatgttataattgtttatttaatttttatttttgggtattattatgtgttttagttttgtaaagtgttgtgattataggtatgagttattgtatttggttaatttattttattattaatttattttttattattttttagagataggtttttattttgttgttaaggttagagtgtagtggtatatatatatatatatatatatatatatatatatatatatatatgtatatatatatatatatatatatatatatgtatatatatatataattaagatagattaaaaatttaaaaaagtaaatagtttaataattttttaaagtattttaataatttaagtttgattttttttagtttatgtgaagtaaaaaattttatagatagaagtataattaatttttaattatttatttatttgagataggattttattttgttatttagattagagtgtagtgatatgattttagtttaatgtagttttgattttaagggttttagtaatttttttattttaattttttaaatagttgggattataggtgtgtgttattatattttgttaattttttgtatttttttttttttgtagagatagggttttattatgttgtttaggttggttttgaatttttaagtttaagtgatttatttgttttgtttttttaaagtgttgggattataggtatgagttattgtgtgtagttagaataaatatattttaatgttaggaaaaagtatttgttgttgatgattttgtagaaaaataagagaatatgatgtttatgttgatggaattttattgattttttaaatattatgttaagagaaagaatatagggtttttttttttttttttttttttttttgagatggagtttgtgttgtttaggttggagtgtagtggtgtgattttggtt

SEQ ID NO: 4001 - DNA, 4090 bp, Artificial Sequence
  chemically treated genomic DNA (Homo sapiens)
ggtttttaataattattgaatgaaatgttttttaatatggtattttttgtattgttatttagttttttttagtgtaggtttgattttgatttttttagatgtgaaatttgttgggataaggattagattttatttatttttttatttttattatttgtttttttgtttaatatttatttaaaggggaaagaaaggaaagatagtgaatttagggtattgataatttagaaagtgtggaggtgggggttagtgagtagagagttatttggattttaagggtgtgggtaattttggagaggaataagttattatatttatttgtttatgaatttatttatatttgtttttttttagaaagggtttgaggtggttgataaaaatatatataatataaggtaaaaaataagttgttgaggaaattaggttgagaggaaaataagagtaggaaaaataagattgagttggtttgttataagtgggttaaaaagttggttaagttttttatagtttatttgaggtggaagttttttttttttttttgttttaggggtggttatatgttttatatggatggggagagatgtatttgagagagagggtggataggattttttttgtatttttttagttgttaggttgttagtttggtgtttgggtttagtagtttttgtggttttggagagtgtgaagtggaggggtgtgtggttttggggggtagtttgagtttagatttgggttttaaggtgttggtggggagtttgtgatttgggatggggtgttggaggttgaggaattgtgtttttatgttatgttgtagaggtttttgtgtttgaaattgaatgttttttagttattattatttatggtttattaagtgtgtgttttgggtttagggtataaagatggagggagtggtgtgatttatttgttttatttttatttattagataaaggggtaggttgttttttttttagttttttttgtgggttttgttgttttttgtttttttttttttgggttgttttttggtgatttttttttttttttaagggtggttttgggattttttaggaattgtgttttatttggatgtggggtggggagttggtgtgtagagggtggtttttgggtttatttttaggttgagttggttttaggtttgtgtttttttttttgaatttgtgtttttggtttttggtgtttttttgtttaggtgtttttgtttttatttggttaagtatgtgttgtttgggttttgagtgttttttgttgtatgggtgggggttgggtttattttttgtttgttttttatttttattggaaatatttttgttatatttttgtaattgtaaggtttagtttgttgttttttattttgtttttgtgttgggtttagggtttttttgtgttttttttattgttggtttgttttttgaggagggggttgggttagggttttggttgattggggaggaagaaggggagtagagaaaaatatgagttatagttgtgtgttattggagtgtattttaattttttgtattataggaggtgtggaaggttgttttggggattgggtgtgggaggtgtgtttgagaaggttttgggttggtttgtagggtgtgttgttttgtttgtgttttttttttttttattgttttttttgttatttttttttttggttttttttttgtttggtgtaataagtttttgttaagttgggtgttgggtgggttaggtgtggtggagatggtttgtgtgtttggtttttgtttttaaagtgtttttaggtgatttttggtttattttttatttttatttatagttttaatggaagggtttaggtttttaagtgggtttgtgtatttttagaatattatttaagttattttaaggtatgaagttttttttgggtgtatttgttaatgagttaattgttggttttgttggaaggttttattttgattatggtttgttggtggttattaataaaatattttggattttataagttttatgtttgaattttataagatttgtattttattaattagttatatgtgggttgatattgaaaggtatatgttgatatttgtttgtttaggggaaatttattatttttttattttagttagggggtggtgtgtaggttgtggaattttttaatgagtgtgtttttttttattttttgggtttgtgtggatttttgtttatttttatatgttttggggggggggttgggtttatatgttttggaagtttttagaggtgattttttttgggatttttgtattagggaggaaggatattgttatttgttattattttttgttagaagtttttttgtgatttttttgtgtgtgtttttttatattttttttgtttgggattgtgaggagtgggtggttgatttgagtttgtagtttaggttttttatatgtttttttttgttgttagtatttatttgtgtggtagtggtggtggtggttggtgggtggttgtttttttaaatttttgggtttatttgtatggttttgttttttgagtgatatggttggtgtgggtgggtttgttttttttgtttttgggttgttttttttaagtttttttgagttggtgttgtgtttttttaattgggattttgagttggggttatttttggtgttggtgtggttttaagaaggtgtgagtttgtggttgttttggtggttttttttttttatatttataatttaattaaattatttatttattgaggttgtgtatgggttgtgtttagttttttgttttttgttattttttgggggagggggaatatttttgtttttttgtttggttgtgatatataaatattttgtgggggtttgggtggtgagtatgtggtggtggtggtttttgagtgtttttgtttttttttggttttagatttgtatttgttattagtggtggttgtggtggagttaggttggtttttagtgtttagtattgttgtttttggtaatttggagtgtgtattgtaggttggtggttgagtttgtggtgagttgtttttggggtttgtggtggtggtggtggaggggggtgtttgtgtttttgtttgtatgttgttttttttgtgagttgtttggggttgtagtgtgtgttgttggttttatttttaggttggggtggtgtgagttggtggtgggggagggttgtgtggtgtgggggtgggtggtggggtttggtggtgtggggaggatgtttgtatttttttttttgtgttgtgggtgttttgtggggggtggggatttgggaaaggtgtgtggtgggggagggggtgtgtagttgtggtgagtgtgagttgtgtatttggtggagtttggaggagtttggtgtattttgtgtggtggttgtttttgttggagttggagtttgagtttgagtttgggtttgggtgaggggtggggagagatatgggttgtggtgtggtaggagagtggggggttgggtgttttttgtagtttagggaagttttggaagtgagggagatggggaggaatttttaaatttggttttatgtttttttggttttttttttgtgttttttttgtagatgaggttggagtgtgggtttgggtttggggttttattttgattttatttttggtttggtttgtgtttttttagttttaggggttgggtttgttttttgtttttataaattggttttgttgttttgttgggttttgttggaattagtttttttgattttttgtttttattttatttttttttggggttttattttgtggggaggggatggagggagggggtttttttttttttttttgtgtttgtgtgtgttaggttttttgttttaaggtgggtttgggtgttttttttggtaggaagtggggttgggtgtatttgtgtggtggtgtatgtggttggggtgtgttgtttttttgtgtttgtaggagtggtttgtgtttttttttttgtgtgttttggttttgggttttgttggttggtttgtaatggttgggtgtagatatttgtagagttatttttgggttgggtttggagtttgatgttttgggggtttag

SEQ ID NO: 4002 - DNA, 4090 bp, Artificial Sequence
  chemically treated genomic DNA (Homo sapiens)
ttaaatttttgaggtattaggttttagatttggtttgagggtgattttgtaagtgtttgtgtttggttgttgtaggttggttggtgggatttggggttagggtgtgtggggggaggggtgtaggttgtttttgtaggtgtgggaaagtagtgtattttgattgtatgtattgttatgtgggtgtatttggttttattttttgttagagggggtatttaagtttgttttggggtaggaaatttggtgtgtgtgggtgtgggggagaggaagaaagttttttttttttgttttttttttgtaaaataaagttttagaagaaaataaaatagaaatggggagttaaagggattagttttaatagagtttagtaaagtagtgaaattagtttgtgggggtggagggtaggtttggtttttggggttgaagaggtgtgggttaggttagaggtggggttggggtgaagttttaaatttaggtttgtgttttggttttatttgtggagggggtgtgagagaaaggttgagagggtgtagggttgaatttgggggtttttttttattttttttatttttagaatttttttgagttgtggggggtgtttgattttttatttttttgttgtgttgtagtttgtgtttttttttgttttttatttgggtttgggtttgggtttgggttttggttttagtgggagtggttgttgtgtgaggtgtgttgggtttttttgggttttgttgggtgtataatttgtgtttgttgtagttgtgtgtttttttttttattgtgtgttttttttgggtttttgttttttgtagggtgtttgtggtgtgggggaaggggtgtgggtgttttttttgtgttgttgggttttgttgtttgtttttgtgttgtgtggtttttttttgttgttggtttgtgttgttttggtttgggaataaagttggtggtgtgtgttgtagttttgggtggtttgtaggaggggtgatgtgtgggtgggggtgtgggtgtttttttttgttgttgttgttgtgggttttggggatgatttattgtgagtttggttgttggtttgtggtgtgtgttttgggttgttgggagtggtggtgttgggtgttgaggattggtttggttttgttgtggttgttgttggtagtaaatgtggatttgaaattgggagagagtagaggtgtttagagattgttgttgttgtgtgtttgttgtttaggtttttgtggggtatttatgtgttatagttaggtggggggataaaaatatttttttttttttgaaggatggtgaggggtaggaagttgggtatggtttgtgtgtggttttaataaataaataatttaattaaattatagatataaaaaaaagaagttattggagtggttgtgaatttatgtttttttggagttgtgttagtgttagaaatagttttggtttggagttttaattagaggagtgtagtattggtttaggggagtttaaaaagagtgatttaggggtaggggggatgggtttgtttgtgttagttgtgttatttagggggtggggttatgtaaatgagtttggggatttaaaagggtggttgtttgttagttgttgttgttgttgttgtgtgggtgggtgttgatggtagggaggggtgtgtgggaggtttgggttgtgaatttgagttgattgtttattttttgtagttttggatggaggaggtgtgggaaggtatgtgtagaggagttatgaaggagtttttggtggggggtggtgatgggtggtggtattttttttttttggtataggggttttagggagagttatttttaggggtttttagggtgtgtgggtttggttttttttttagggtgtgtgggggtggatgggggtttatgtgggtttagggggtgaagagaaatgtgtttgttagagaattttgtggtttatatgttgttttttaattaaaatagagagatggtagattttttttgggtggataggtgttagtatgtgttttttagtgttaatttgtgtgtggttgattggtgagatataagttttgtgaaatttaaatgtgaaatttgtgaaatttaaagtgttttattaatggttattagtgagttatgattaaggtggagttttttagtgaaattaatgattggtttgttggtaggtatatttaagggaggttttatattttgaggtgatttagatggtgttttggagatatgtaggtttatttggggatttgggtttttttgttgggattgtaaataaaaataaaaggtgggttagaggttgtttggaagtgttttgagggtaggggttgagtatgtaggttatttttgttatgtttggtttgtttggtgtttggtttaataaagatttgttgtattgagtgagaaggaagttaaaggggaagatggtggggagggtggtgggggaggaaagggtgtaggtggagtggtgtgttttgtaggttggtttggggtttttttgggtgtattttttgtgtttggtttttgaggtggttttttatattttttgtgatgtagggaattgaaatgtgttttagtgatatatggttgtgatttatgtttttttttgttttttttttttttttttggttagttgaggttttggtttagttttttttttagggggtgagttggtggtggaggggatgtaggaaagttttgggtttggtgtggaggtggggtggggagtggtgggttgggttttgtagttgtaggaatgtggtaggaatgtttttggtgggggtggggagtgggtggggggtgggtttagtttttatttgtgtggtgggaagtgtttggggtttgggtagtatgtgtttgattgggtgggggtgggggtgtttgggtgggaaggtgttaggggttgggagtgtgggtttaaaggggagggtgtgggtttggggttggtttggtttaggggtgggtttggaggttgttttttgtgtgttggttttttgttttatgtttaggtgaaatgtagtttttgagaagttttggggttgtttttggaggggaaaggaagttattaaagggtggtttgaggggaggggagtagagggtggtggggtttgtgaagaaggttgggggaggggtggtttgtttttttgtttggtgggtgggggtggggtgggtggattgtgttgttttttttatttttgtgttttgggtttggagtgtgtgtttagtaggttgtgagtggtggtggttggagggtgtttggttttgagtgtgggaatttttgtggtgtggtatggaggtgtgattttttagtttttagtattttgttttaggttataggttttttgttagtattttgggatttaggtttgggtttgggttgttttttagagttgtgtgtttttttattttgtgttttttaaggttgtggaggttgttaggtttgggtattgggttggtggtttggtggttggggaggtgtggagagggttttgtttgtttttttttttgggtatatttttttttgtttgtgtgggatgtgtggttgtttttgagatggggaggggagagggatttttgttttgagtgggttgtggaaaatttggttaattttttggtttatttgtagtaagttgatttgattttattttttttatttttattttttttttggtttgatttttttagtgatttgttttttattttgtattgtgtgtatttttgttagttattttaaattttttttggaaggaggtaggtataaataaatttgtaggtaaataaatatagtagtttgtttttttttaggattatttatatttttgaaatttaaataattttttatttattgatttttatttttatgttttttggattgttaatgttttgaatttattgtttttttttttttttttttttaaataagtattaagtagaagagtgagtggtagagataaaaagatgggtaggatttagtttttgttttagtgaattttatgtttagggaaattagaattaggtttgtattagagaaaattgaatagtagtataggagatgttatgttagaaaatattttatttagtagttattgagaatt

SEQ ID NO: 4003 - DNA, 2380 bp, Artificial Sequence
  chemically treated genomic DNA (Homo sapiens)
ttattttaaaaagttttgtgatttttaaggaaatagttggattaaggatgaaaaagaatattagaatttttgataattttttaaatattagtatatataagaatatagggtagttatggtagtttatgtttgtaattttagtattttgggagtttaaggtaggtggattatttgaggttaggagtttaagtatagtgtgggtaatatggtaaaattttatttttataaaaaatataaaatttagttgggtatggtggtatgtatttgtggttttagttattttggagattgtagtgggagaattatttgagtttgggaagttaaggttgtagtgagatgtgattatattattatattttattttgggtgatagagtgagattttaatttaataatataaaagaatatatatttatagatatatgtaatatatatttatttatgatttttattatattttatgtatttttggtttatatttaattgattaatagtttttaaaataatatttgtgtaaattataatttatattgtatgattaattttaaattgaaatttttattaaatttaaggatttataatgtattatatatatttttattttgtaattagaatgaagtgtgaagtatataatgtatgttggtaaggaattgaaaatttaaatttgtttttagattataaatttatttgaaaatttgtaaagttttaatagtatatgagtatatgaaggttattaatattttgaaaatagtatttagtttttgatttatttattttttattttttatttgtattagaaaaggggaataaagatgttgaatttatggttagttttttaaaggtttgttgttttttgataatgagtaaattgttttttttttaattttgtttttatttttagggaagtttttgttttaattttgagaggaaagtagaattttaattgtaaaataaaggtttttggttattttgatatatatattatttaaaagtgtaattgattttgatagtggttttgttttttaggattttttttttttttatagaatttagtatattggagagatggtagagatggtatttgatttgttgttgatgtgattgttttttttaaaatgtttagattttgatttattaatgttaaagtttttttatgagatattggtgttagggtggtattgggtaatattgttgtatgtttataaatagttgtagtgaaagtgttttggtagttggtttttgagatatagaaaagtaaaattgttatgtaagttggtaattgagtagttatgttgaagtttaatgagtgttgaaaaatagagtatgttttggtatttatagaaagaagatatgtggtgtttagaatttagtattttaaattatggaagttaattaagaaaatgttatgattttatagtattgttatataataaaagattttattttattgtagtaatttgtgaagattaatttaagaattttatgtatattagtttgttagggttgtttaataaaatataataaattgggtggtgtaaaaaataaaaaatttattgttttgtagttttggagggtgggagttttagatgaaggtgttagtagagttggttttttttgagggtggtgaaggaaagatgtgttttaggtttttttttttgatttatagatggttgttttttttttgtgtttttttatatgttattttttttatgtgtgtgtttgtatttaagttttttttttttgtgaggatattattttaatttttaatatagggaaagggaaaattttagttttagttttttttgttattgttgttgtttgtttattgttgttgttgtttgagatggagttttatttttgttatttaggttagagtgtagtggtgaaattttggtttattgtaatttttgttttttgggtttatgtgatttttttgttttagttttttaagtagttgggattataggtgtttgttattatgttaggttaattttttgtatttttagtagagatagggttttgttgtgttgggtaggttggttttaaattgttgattttaggtgatttatttgttttgtttttatgttaaataagggtagaagaaaaaagttaattgaaggttataaatttaggggtataggtttattgaaagattgagatttaattataggattaatttgatttagtgtttattgtattttagtataattttattttaattaattagatttgaaatgattttttttttaaaaaagttatattttaagatattgatagttaggattttaatatataaatttttggaatttatatattttggaatgttaatataagatatttaaataattttaaaattttattattatttttatgtgaatatt

SEQ ID NO: 4004 - DNA, 2380 bp, Artificial Sequence
  chemically treated genomic DNA (Homo sapiens)
aatatttatatgaaaataataataaagttttaaaattatttgaatgttttgtgttgatattttaaaatatatgaattttaaaaatttatatgttgaagttttaattgttagtattttagaatgtaatttttttggaaaaggggttattttagatttaattagttaagatgaagttatattggagtatagtgggtattaaattgaattggttttatgattgagttttagttttttagtgagtttgtatttttgggtttatgatttttagttggttttttttttttgtttttatttggtataaaaataaagtaggtggattatttgaggttagtaatttgagattagtttgtttaatatggtgaaattttatttttattaaaaatataaaaaattagtttggtgtggtggtgggtgtttgtaattttagttatttgggaggttgaggtaggagaattatatgaatttgagaggtggaggttgtagtgagttgagattttgttattgtattttagtttgggtgataagagtgaaattttattttaaataataataataataaataaataataatgatgataaaaaaagttagagttgggattttttttttttttgtgttaaagattagagtggtgtttttataaaaagggaaaatttggatataggtatatatatggggagaatagtatatgaagagatatagggagaaggtagttatttatgggttaaggagagaggtttggaatatattttttttttattgtttttaggaggaattaattttgttgatatttttatttgggatttttattttttagaattgtaaagtaataaattttttattttttatattatttagtttattgtattttgttaggtagttttagtgaattaatgtatatagagtttttgagttaatttttataaattattgtaataaggtagggttttttgttatgtaataatgttatgaaattatagtgtttttttaattaatttttgtagtttaaggtattaagttttggatattatgtgttttttttttataaatattaggatatgttttgttttttagtatttattggattttagtatgattatttagttgttagtttatgtggtaattttgtttttttatgttttaagagttagttgttaggatatttttattgtagttgtttatgagtatgtagtgatattgtttaatgttattttaatattagtgttttgtgaggaggttttggtattaatgaattggaatttggatattttggaaggagtgattatattagtagtagattaggtattatttttattatttttttagtgtattggattttatgagaaaggagggggttttaggagatagggttattgttagggttagttatatttttagatgatatatgtattagagtagttaagaatttttattttatagttagaattttattttttttttaaaattagagtaaggatttttttaaaagtaagaataaagttaagaaaagaataatttgtttattattaagaagtagtagatttttgaggaattggttataaatttaatatttttgttttttttttttggtatagatggaggatggaggataaatgggttagggattaggtgttatttttagagtattagtggtttttatgtatttatgtgttattaaggttttgtaggtttttgaataaatttataatttgaaaataaatttaagtttttaattttttgttagtatgtattatatattttatattttattttaattataagataaaagtatatgtaatgtattgtgagtttttaagtttagtgaaggttttagtttgaagttaattatatagtataaattgtggtttatataaatattattttaaaagttattgattgattaggtgtagattaggaatatatgaagtgtgataaaagttatggataaatgtgtattatatatatttataaatatatatttttttgtgttgttgagttaaggttttattttgttatttaggatggagtatagtggtgtgattatgttttattgtagttttgattttttgggtttaggtgatttttttattatagtttttagagtagttgggattatagatgtatgttattgtgtttagttaagttttgtattttttgtagagatgggattttgttatgttgtttatgttgtatttgaatttttgattttaggtgatttatttgttttgggtttttaaagtgttgggattataggtatgagttattgtgattgttttatatttttatatatattaatatttaaaaggttattaggagttttgatgtttttttttatttttagtttaattatttttttgaaggttatagagttttttaaggtga

SEQ ID NO: 4005 - DNA, 2405 bp, Artificial Sequence
  chemically treated genomic DNA (Homo sapiens)
tagttaaaatttttgaagtatatatttttttaaatttttaaattttaaattatgtttggttttttagttttatttttgtttgagtttaatattagtattttattattatatatggtgtaaggtttttttttgatatattttatttatattttaagaaataattttattattttttataaagtatgtgaaattataggtattaaatatatatgtttatttaaattttaagattaatttatttatatgttatatttaattatgagtattttgtgaaattattatatttgaaaggaaattttttaaaatgtattttaattagttagattgatgttatttggatttaaataggaagattatattttttttgtttgtaatgtaatttttatttttatgtgtaatttttaatataattaatatatataaatttagtttgagatagttttgtttatgttatttagattggagtgtagtggagtaattaatttttgtttattgtaatttttgttttttggatttatgaataatttttttattgtagttttttgaatagttgggattataggtttgtattattagatttagttagtttttgtggggatagggttttaattatgttaatggttaagttttaggtttgaatgatttttttgttttaatttttattgaagtgtaagtattgattgtttataagtgttaagttattttgtttagtgatatatataattaaaattattttaaattaatggttgatggaatgttttttgaaaatttagtttttgtatatttttgaaatgtgtttaaatgggtatttgtgataggtaagtaagatggttggttaatagtagtaatgttttgtaatgtatagtttttttttgagatggtaggtggttttgaaaagagttttttgttttttttgatatagaagtttttttattaatgataattttaagttatttgttttgggttttatggtggtgatttttagtttttttgggtagtagtattgtttgaatgttaggtaggattttgttttgggtaatggttatgttgtttaaaagtttattgagttttttattattgtggattgttagttgtaggtggtggggaataatgtgagtttttttgttattgtgagatgtattgtttgttagtttaaggatttttgttgtgagatattttaatattgttgttaaatatattggtgtgtttgtttttatttgttttgtatagttttttttatgaagtagatgatggatttggtttatgggaaattgtaaatttgttttagaagagtgagatttagatttggtgtgtgttttttttttttgttttttttgtttagatatttttttgtattaaattgtagtaatatgagaattatatttttagggttgttattgggtttatttatagtttgattgaggttggtatttgttatttgattggttgatggttgtttatttaattagaaagttgtattagaattgttttatttgtatttatgttattttttattgtttaattagattttggatattgaatgtggtgtttgagggttgtgtttataaatattgtattttttattttttagttttgtttgtttatttggtgagatttggagttgaggttatttggagttgtttaatattgaagagttgttgagtattggaaagtgttgtgtaattttggaaaagaattgtgtaatgttgtagaagtgtgtggtagttatgttggaggtgttatttaaaggtgttattatttttaagaagggttttaagaaagttgttgttaagatttagaaaaaggaaggtaaaaagtgtaagaggatttgtaaggagagttattttatttatatttataaagtgttaaagtaggtttatttggatattggtatttttttgaaagttatgagtattatgaatttttttgttattgatatttttgagtgtatagtgagtgaggtattatgtttggtttattatagtaagtgttttattattttttttagagagatttagatagtagtgtgtttgttattgttgggagagttggttaaatatgttgtgtttgagggtattaaggttgttattaagtatattagttttaagtaagtttgttaagtaaatgttatttttaatttaaaggttttttttagagttatttaaatatattgaaatagttgtgggttttgtttttgtgtagtttttaattgtaagggttttttttttttttgaggtggagttttatttttttaggttggagtgtagtggtggaattttggtttattgtaagttttgttttttgagtttatgttatttttttgttttagttttttgagtagttgggattataggtttttattattatatttggttaatttttgtatttttagtagagatggggtt

SEQ ID NO: 4006 - DNA, 2405 bp, Artificial Sequence
  chemically treated genomic DNA (Homo sapiens)
aattttgtttttattaaaaatataaaaattagttgggtgtagtggtgggagtttgtagttttagttgtttaggaggttgaggtaggagaatggtgtgaatttaggaggtagagtttgtagtgagttgagattttgttattgtattttagtttgggagagtgagattttgttttaaaaaaaaaaaaaatttttatggttagaaattatataaaaatgaagtttatagttgttttagtatgtttaagtggttttgaaaagagtttttgggttagaaatgatgtttatttagtaggtttatttggagttggtgtatttagtgatagttttggtgtttttagatatagtatgtttagttagtttttttggtagtagtaagtgtattgttgtttgaatttttttggaagaaatggtggagtgtttgttgtagtgagttaaatgtgatgttttgtttgttatatgtttaaagatattagtgatgaaggaatttataatgtttatagtttttgaagagatgttagtgtttggatggatttgttttagtattttgtagatgtaaatagaataattttttttatgggtttttttgtgttttttgtttttttttttttgggttttaatgatagtttttttaaagttttttttggaaatggtagtatttttagatgatatttttggtatagttattatatatttttgtagtgttatatggtttttttttagggttatatagtattttttagtgtttaatagttttttagtattaaatagttttaaatgattttagttttaagttttgttaagtaaataaatagaattggaggatgaaagatgtggtatttataggtatggtttttaaatgttgtgtttggtatttaaaatttgattggataatgggaagtggtgtgaatgtaaatgaggtgattttagtatgattttttgattgggtagatggttattagttaattagatagtaaatgttaattttagttagattataaataggtttagtagtagttttagaaatgtggtttttgtgttgttgtaatttgatgtgaggagatgtttggatgagggaagtagggaggaaaagtatgtgttaagtttaagttttgtttttttagagtgggtttgtagttttttgtaggttggatttattgtttgttttgtaagggaaattatgtagagtggataggggtaggtgtattagtgtatttggtggtagtgttagagtattttatagtagaaatttttgagttggtaggtaatgtgttttgtgataataaaaaaatttgtattattttttgttatttgtagttagtgatttgtaatgatgaggaatttaataagtttttgggtggtgtgattattgtttagggtggagttttgtttaatatttaggtagtgttgttgtttaagaagattgagagttattattataaagtttaaagtaagtaatttaaggttgttattggtaaaaagatttttgtgttagaaaaaataaaaggttttttttagagttatttattgttttagaaaaaggttgtatgttataaaatgttattgttgttaattagttattttatttgtttgttataaatgtttgtttaagtgtattttgggaatgtatggggattgaatttttaaggagtgttttattggttattagtttgaggtaattttggttatatatgttattgggtgaggtggtttaatgtttgtgagtagttagtatttgtattttagtggaggttggagtgggagggttgtttaagtttggggtttgattgttaatataattgagattttgtttttatagaaattagttgggtttggtgatgtaggtttgtagttttagttgtttgggaggttgtggtgggagggttgtttatgagtttgggaggtgaaagttatagtgaatgaagattgattgttttattgtattttagtttgggtgatatgagtgagattattttaaattagatttatgtatgttagttatgttaagggttatatatggaagtgaaaattgtattataagtaggagaggtgtaatttttttgtttaaatttaggtaatattagtttggttggttaaagtatattttagagaatttttttttaaatatggtagttttatgaaatatttataattaaatgtggtatgtaagtaagttaattttaaaatttgggtaagtatatatatttgatatttgtggttttatgtattttgtaaagaataatagaattattttttaaaatgtaagtaaaatatgttaaaaagaagttttatgttatatgtgatggtgagatattagtgttagatttaggtaggaatgggattagaaggttgaatataatttgaagtttagaaatttggaagagtatatgttttaaaagttttgattg

SEQ ID NO: 4007 - DNA, 2500 bp, Artificial Sequence
  chemically treated genomic DNA (Homo sapiens)
tagtgtttattaaattttatattggattaagtgtttatttttttgttttttatgtaagggttgttaaatataattaataaattttagtgattaattgggttaaatgagagatgtaataaattttttatttttttatggaatttaaataatgttttaaatttattaagtaaggaggtaagtttatttgattattttttttataatttaatgtagtaattattaaattgttaatggatatattgttgtaatatttgatgtagtaatttgaaatagtattttagtaaaaattatatttagatatattttttttttaaagaaaagtagttttaatagaagtttttatagttttaataaaattattggtttgttttaattttattttaggagggttgtgaggaaattataaatatatagaattgaagtagaggtattggtttaagtttaattttagaaagtatttttaaattattaatagtttggtttgtattgtaaatagtaaatgtgttaatgttatgtttatttagaaattattttaaattgtatttattgataattaaattagaatttaaataatgtattatttaatagttttgaaatatttaatttaatatggagtgtagtaggttttgataggtgttgggaatttagttaatgatttatgaggttattatttagtatttttagtaagaagaaggttgtattttaatgtttttttgtttggatttgttatttagtttttttttaattaggatagggtgtatatataatttttaggttttatttgtgtttataaaatttggttaaaatgattttagtgtgttttttatatttttttttatattttgaggatatttaatgagtttttttggttgtatttaatattatttttaggatagggagaaatttttatgttagatttagtgatggaagtagattttttagtaattgagatagtttattgttgttgagaggaagatattgttaatggtgatatttgtttgatttatttgtgttggtggaaatggtaatgtaggtattgtttgagggagttttagaaattattgttttggggtagaatttgtaattattttgtgtggttttttaaaatgttttttattttttgtttttgaataaaatgtttttataaggaaatattagggagaatttgggtttattgattgtatgttttaggtattttttttggggtaggtaagtagggggttgtgtttttttttgtgttggttgtgtggttttttattgggatttttttgatggtgtgaggtaaggagtggattgagaggtttttgagttttgagttgagtgtgtgtgggttgtgtaggaggtttttgtgttgtttgtagtttttgtgaggatttaggtttgatagttggtgaggtagtttttggtgtgtgtgtaggagtttagatttttggttttgtttttggttgggttagtttgggtgttgtggttgtggttgggtgtgtagggggtttaggttgtaggggttgttgatgtgggagtaaggattttgtgattgggggtagataggttggtagggtggggggaagtatgggggttggaagttggtattgggggtgtgggatagtggtggggtgtttgtgtagggagattgatttatagtgtttagttggggtaattgtgttgttttgttgttggtgttgttgtgatggttttagaagagagtgagaggaaaggtaaagaataaggaattaggtgttgagttataattatttatataaaatttatttgataagtttgtgtgggaaattgtttgtttttgttggttggttgttgggaaaaaattagttttaagttttttttaggaaatatttttaagtgaaatagattgaataatgtagagaaattgtatatggagggggtataagagattatttaggggttttttttaaagagaggaaaagatagaaaagggttttttggaatatagtttattaaattgtagtgtgaaattttttttaagtaaaattaaaattttttttaaatattaaatagtagaagtggttttttttttttttttgatttgaatttgtttgttattgtgttattgtttatttttttttatttatttggagagaaaaaaattataaatgtttaaagattgttattgttttatgattatttaaatagaaatatattttgtagaggggttgtaataaaaatatatgtttaaattattagtttaaagaaggttttaattgtaggattggggtttgttttttttgttttttttgttaggagttttttttttgatagagttgatttatggtttggatagggaaagggggatgttaagttaaggtttaaaatagaaagatttagttttattgggtttaaaagagagaggtgtattttggggttgtggttttttttttttgttttttttattttagttttaaagggtagaagaaatgtttgattttaggtttttttattgtaatttttttgtaaaataagtgaa

SEQ ID NO: 4008 - DNA, 2500 bp, Artificial Sequence
  chemically treated genomic DNA (Homo sapiens)
tttgtttgttttgtaagggaattgtaatagagaaatttaaagttaggtgttttttttgttttttggggttggggtggaaggggtggggggggggggttatagttttggggtgtattttttttttttaaatttaataaggttgaatttttttattttaaattttgatttgatgtttttttttttttatttaaattataaattgattttgttgagaaaaaggtttttaatagaggaagtgaaaaagatagattttgattttgtagttaaaattttttttaagttggtaatttaaatgtgtgtttttgttatagtttttttgtgaaatatgtttttatttaagtagttatgaaatggtaatagtttttgaatgtttatgatttttttttttttaaataaatggaagagaataaataataatgtagtggtagataggtttaaattgggggaaaagaaaaggttgtttttgttgtttagtatttaggaggaattttaattttgtttaagagagattttatgttgtagtttaatgggttgtgttttaggagatttttttttatttttttttttttttgaaagaaatttttaaatagttttttgtgttttttttatatatagtttttttgtgttgtttggtttgttttatttgagggtattttttgaaaagaatttagagttgatttttttttggtggttagttaatgggaatgggtgattttttatgtagatttgttaagtggattttgtgtggatagttgtagtttgatgtttgattttttgttttttatttttttttttgtttttttttaggattgttatgatggtattagtaatgggatggtatggttgttttagttgggtattgtaggttaatttttttatatgagtgttttgttgttgttttatatttttaatgttgatttttagtttttatatttttttttattttattagtttatttatttttagttgtaagatttttatttttatgttaatgatttttatagtttgaattttttgtatgtttagttgtagttgtagtatttaggttggtttggttagaggtagagttaggagtttgggtttttgtatatgtattgggggttgttttattagttgttgggtttggatttttgtagggattataggtggtatgaggattttttgtatggtttatatgtgtttagtttaggatttggagattttttgatttattttttattttatgttattgaggaggttttggtaagaggttgtgtaattagtgtgggagggaatatagttttttatttatttattttagaaaggatatttggaatatatagttggtgggtttgggttttttttagtatttttttataaaaatattttatttggaggtggagagtgagggatgttttgaggaattatataaagtagttgtgagttttattttagaataatggtttttggagtttttttaaataatgtttgtattattatttttattaatatagataaattagatgaatgttattattaataatattttttttttgatgatagtaaattgttttaattgttaaaagatttatttttattgttgagtttggtgtggagatttttttttgttttgggaatgatgttaaatgtaattaaaagagtttattaaatgtttttaaaatgtaaaaggaagtgtaaaagatatattaagattattttaattggattttataagtataagtgaaatttaaaagttatgtgtatattttattttgattaaagaaaaattaagtagtaaatttaagtagagggatattaaaatgtagttttttttttattaggggtgttaagtggtgattttataaattattagttaggtttttaatgtttattagaatttgttatattttatattaaattaaatgttttgagattattgggtaatatattatttgagttttaatttagttattaataaatgtagtttaaaatgatttttaaataagtatggtattagtatatttattatttataatgtaaattaggttattgataatttgaaaatattttttggaattaaatttaaattagtatttttgttttaattttatatatttatggtttttttataatttttttgaaatggaattagagtaagttaataattttattaaagttgtaaaggtttttgttaaagttgtttttttttggagaggaaatgtatttggatgtgatttttattaaaatgttattttaaattattgtattaaatattgtagtagtatgtttgttgatagtttaatgattattatattagattgtaaggaaaatggttagatgaatttatttttttgtttggtgaatttaaaatattatttaagttttgtaggaaaatagaaaatttattatattttttatttggtttagttagttattgaaatttgttggttatgtttagtagtttttgtatggaaggtaggaaagtgggtatttgatttagtataaggtttagtgagtattg

SEQ ID NO: 4009 - DNA, 2475 bp, Artificial Sequence
  chemically treated genomic DNA (Homo sapiens)
ggggggttgtaaggtttttttttttttatgaggttgtattttaggttgttttagtggggggaaatttggataatatttaggtttttttgggtaggggtttttgtggttttttgtagtgtattgtgtttttagttaatagagaatggagaatggtgatgatttttataaagtatattgtttgtaaatatatttttattaaggtatattttgtatagttttagatttattaaattttgatttaatatagtatatgtttttgtgagtataaggttgggataaaagttatagattaatagtattttaaagtagaataaaatggagttttttatgttttttgttttttatatagatatagtaataatttgattttttttttttttttttatatttattttattatatgatattaatattgatttttttatgtaaaatgttagttttaggttttttttatttttgtgttttgtttgtgtttttaagggtgtaattttttgttttttttttttatagttagtgtgtgtgtgtgtgtgtgtgtgtgtgtgtgtgtgtgtgtgtgtgtgtgtgttatattttgatatattattagaatttaaattaatttattttgttatatttttttgttattgataattttttatttagttatgttataaatgtattttttaaagtaagtgtttgaagagatagggttttattgttgtttaggttggagtgtagtgttgttattatagtttattgtagttttgatttttttggtttaagtaatttttttgttttaattttttgagtagttgagattatatgtgtgtgttattatgtttggtatatatttattttttattatttgtgtttgtatgtgtttagaggtatagataatattaaaatgaaaagaggtggtagagaataggaagagaaagaaattagaggagttgatatttttaaatgttgtggtttttaaggattgttagtaggttgtggggttagttagaaaaaatagagtttttgattttagaaggtttggagaaagtgtgagaagggagattagattagaatagattgatggaagggaaaggtggtgagggtgaagtaagagaaatttggttttagtgaaaaggatttattattgtattttagaatgtaatttgtattttatatgtaaatgaggaggttttttagaggttggattgggttgggtttagttgagtttttgtaaatagtagggatttaattttggggaattgtagattaaagtgagagagggatgtattgtatttttaggtatatttaaaaaggatggatgagatattgaagtagaggatataggaggattaaaggatttaggaaagtaagtagttttttggagaagttgttgaaatttaagattggtaagagaagtaaatttaattttttatattgattattttttattttttgaaaagaagagattgtttttttagggaagtgaaaataatgaatttttggaggtattgtttttttgtttttattttgtttagtgtggttatttttgtgagattttatagtagttaattgagtttgttaaaaagttatgagaagttgaatagttttagtgaaaggtattttaggaaaattgtttgtaattatgttttagagaaaatgttagtttttttgtgggaaaatatattattattatttttgtgaagtgttttttgtaaggattatttgatttagaattattatattataagttttttgttggaagaagaggttgtattttttttggtttatgttatggttatttataaggattttgatatttttgaaaggttttttagggttatttatatgttttaaaatgtttattgtgtttatgtggatgagaaagttttagttgagtataaggaatttgtgaggtagttattgagttgtttttaaaatgtttttattgttttaaagatagagtttgtggtttatgtaggtatttttagattttaggttgatttgaattgtttgaaagattttgttgtttttgaggttttttggaagtatgttattaatatttgtggataagatttttttttgaaaattaattgggagatagtttagtatttgaaaggatttaaagggaaaaatattattttaggggtgttgttttttgattatgtaattaagtgaattaaatatgtttattaagagtatatagataaaggtggtttttttgtgaaaaatattaatattttgaaaattttatttttatattagttgattatttattttggtattgtttatgtggtgtttattagagattttgttgattttgttttatgtgattaaagggttattgatttattataatggttaaaagatatttatagttttgatgagtatttttgggtgatatttaatagggttttaggtaggtattaatttttattttgattgatagattgagtttgttaatattttgtttgtttagagaattgatttatttgaaat

SEQ ID NO: 4010 - DNA, 2475 bp, Artificial Sequence
  chemically treated genomic DNA (Homo sapiens)
attttaaatgagttagttttttaggtgagtagaatgttagtaaatttaatttattaattagaatggaaattagtatttatttgaaattttattaagtgttatttagaaatgtttattaggattataggtattttttgattattgtagtagattaatggttttttggttatgtagaataaagttgataaagtttttggtaagtgttatataggtagtgttaaagtagatggttagttgatgtggaggtgaagtttttaaaatattagtattttttataaaaaagttatttttatttgtatgtttttggtggatatatttagtttgtttaattgtatggttaggaggtagtatttttggggtgatatttttttttttaaatttttttagatgttgaattattttttggttggtttttagggggaagttttgtttataggtgttgatgatgtatttttagggaattttagaggtgataaggttttttagatagtttaggttagtttggagtttggaaatgtttgtataaattatagattttgtttttgaagtaatgaaagtattttggaagtaatttagtaattgttttatagattttttatatttagttggggtttttttatttatgtgaatatagtagatattttggggtatatagatagttttaaagagttttttaaaggtgttaaagtttttatggatgattatgatataggttaaagggaatgtagtttttttttttgataggggatttgtgatgtagtgattttgggttaggtaatttttgtaagggatattttgtaaaggtgatggtaatatatttttttataaaaagattggtattttttttaaggtgtgattataggtagtttttttaaaatattttttattggaattgtttagttttttataattttttggtgggtttaattggttattgtaaaattttataaaaatgattatgttgagtagagtgaaagtaaaaaagtagtatttttaaaagtttattatttttatttttttggggaaataattttttttttttagggaatgagaaatgattggtgtgagaggttgaatttgttttttttgttagttttgaattttgatagtttttttggagggttgtttgtttttttgaattttttaatttttttgtattttttgttttggtgttttgtttattttttttggatgtgtttggagatgtggtgtgttttttttttattttggtttgtagttttttagggttgaatttttgttgtttgtaaaggtttagttaagtttagtttagtttagtttttaggaagtttttttatttatatatgaaatgtaaattatgttttggaatgtaatgatgggttttttttattggagttgagttttttttgttttatttttattgttttttttttttattaatttattttgatttgatttttttttttatgttttttttaagttttttagaattagaggttttgttttttttggttagttttataatttgttggtagtttttaggagttatagtatttaaggatattggtttttttggtttttttttttttttgttttttgttatttttttttattttagtgttatttgtatttttgggtatatatagatatagataatgaaaaatgaatgtgtgttaggtatggtggtatgtatgtgtagttttagttatttaggaggttgaggtgggaggattgtttgagttaaggagattaaggttgtagtgagttatgatggtagtattgtattttagtttgggtgatagtgagattttgtttttttaaatatttattttaaaaaatatatttgtaatatgattaagtagaagattattagtggtagaaaaatataataaggtagattaatttagattttaatgatgtgttagaatatagtgtgtatatatatatatatatatatatatatatatatatatatatatatattgattatgggaagagggaataaagaattatatttttgggggtataggtaggatataagggtggaaggaatttaggattgatattttatatgaaagagttagtgttgatattatatgatgaagtaaatgtggggaaaagaaagagagattagattgttattgtgtttatgtagaaaatagaagatataagaaattttattttgttttgttttgagatgttgttaatttgtaatttttgttttaattttgtgtttataaaaatatgtgttgtattgaattaaggtttaatggatttagggttgtgtaggatgtgttttggtaaaaatgtgtttgtaggtagtatgttttgtaaaagttattgttattttttattttttattaattagagatataatgtattgtggaaggttgtaggaatttttgtttaagaaagtttgggtattgtttaggtttttttttattgagataatttgagatatggttttgtgggaagggaaagattttatagtttttt

SEQ ID NO: 4011 - DNA, 2426 bp, Artificial Sequence
  chemically treated genomic DNA (Homo sapiens)
ttaatttttgtatttttagtagagatggggttttattatgttgtttagaatggttttgattttttgattttatgatttatttgttttagttttttaaagtgttgggattataggtataagttattgtgtttggtttaagggataatttttaagattttttgtggatgttggatattattgttagtattaaataatttgattattattaattagaatttatttttgtttttattttttatttataattgtaatgttttttttattttaattaagtatttattatatattatggttataatttttgtagtttgaggtatgatagtaaaattagtatatattttattttttttttttatatttttatagatggaagagttttttttattatagattatagtaattttggtatatgatttttttttttttttattaagttaagaatttttattttgattttttatttaaaggaagtattttatagtttttttttggtatatttaaatttttaatattattatttttgtattttggggttgttgttaagtaaaataagggtgatttgaatataagtattgtaatattaggatatttgatttgagatttgagttaattatgatgtaattaatagttggggattgtgtatagtatgggtatattggataagaggataattttattatattattgagaatggtatgtagtttaaaatttatgaattgtttatttttgaaattttttatttaatatttttggattgtggttgattttaggtaatagaaattaaggataagtggggggtattatatatatatatgtatatatgtatgtttatttgtatatgtgtgtgtatatgtatatatgtgtatttttatatatatatatatatatataaagatatagaaggatatatagtagggattttaaattggtggtttttgaagtggaaattaatatttaaaatttttttgatttttgaatttgtttatatttgattttgtattttttattattttatagatttagatatttttgattttttaatgttaaagtttatatatttgtattaatatttatataaattaatttattttatgtatatatttatattaattttattattatttaatttatatttatattaattgtttggttttataagtatttagtttgtgattttgaatatgtttaggtattaattatggttttttttaggttatgagttgtttttaatttttttttttttttggtttgttttgtttaattttgttaaaataaataaatatggtttttgtaataatggagaaagatgttattttaattaaaaagtaataataatgtggtttgtggttttttgggttgtttgggttatgttttattggtttttattgagtttggtttttttgggttgttgttttttttgtttttttagtttgttttaaatgtgttgttaagtgagtggttggggtttttttttttttttgtgattggggtttagtgagagttggtggttggatattgtttgaagaatgggttttttttggaagtgtttggaaatttagttggggtttgaggtttttttaaatgttgaatttaagtgtggggatttagtttttggaaatgttaattgttttattttgattgggattgttgatagatatattgttttatgttaatgtggtattattataatatagttttatttttagttattgtaagttattaagataatatttggtttgaatttttttttattatggtttaaaaaaataaaagttgaaatttaaattatttttttaatattttgttttttttttttttttttttttttttttttttttttttgtattttagaaattttaaatgagggggaggagtttagaaattgtttattttatgtgtttttttttttattttatagatggggatgttgaggtttagggaggagtagtgatttgttatattataaattttgttaaggtaagtagtttaagttttttaggttttttatttgtaagttaggatggtattgatttttttttatattatttttaagggatttttttaaggggtagataggatggggtatggtgattagtaaggagtttaggtaagtattagttgttgttattgtttaagggtttttagttaattggtagtagaattaggtttttttagaatttgagttttttgatttttaatggtaatgtattttataatttatttgggaggaaggattaagattataatattaatattttttaatgtgttggatgttttattaagtgttttatgaatagtgtaatattatagaggagagtaatgtgttggagtttagttatgattttgagtaagtatattatttttgaaatttttttttatttgtgaaaaatggaaatagtaatggggtaatgagattgttaagagga

SEQ ID NO: 4012 - DNA, 2426 bp, Artificial Sequence
  chemically treated genomic DNA (Homo sapiens)
tttttttaataattttgttattttattattgtttttattttttataagtggaaagaggttttaagagtgatgtgtttgtttaaggttgtagttgggttttagtatgttgtttttttttgtgatgttgtattatttataaaatatttagtggagtatttagtatgttagaagatattagtgttatgattttagtttttttttttgagtaaattgtagagtatattattattggaaattagaggatttagattttagaaagatttaattttgttattaattaattagaagtttttggatggtggtaatagttaatgtttgtttaggttttttattgattattatgttttattttgtttgttttttgagggggttttttaaaggtgatgtggggagaggttagtgttattttggtttgtagataagaaatttgggagatttgagttgtttattttaataaggtttgtgatatagtaggttattgtttttttttgggttttagtgtttttatttgtaaaatggggagaagggtatataagatggataatttttaaattttttttttttatttgaagtttttggagtgtaaaagaaagagaaaagggagaggaagaaaaaagagagatagagtgttaaaggagtggtttggattttagtttttatttttttaggttataatgagaaaagatttaaattagatgttgttttagtgatttgtagtagttgagagtggaattgtgttgtgataatattatattagtatgaagtaatatatttattaatagttttagttagagtaaagtagttggtatttttagggattgagtttttatgtttgagtttagtgtttgaaaggattttagattttaattgggtttttaaatgtttttaggaagggtttattttttagatagtatttaattgttagtttttattggattttagttatagggaaaggaagggattttagttgtttatttggtgatatatttgaggtaggttggggaggtaggaagagtagtagtttagaaaagttaggtttagtgggggttagtggagtgtggtttaaatagtttagagggttataggttatattgttattattttttaattaaaatggtgtttttttttattattataaaagttatgtttgtttattttagtaaaattagatagggtagattaggaaaaagaaaaaattaaaaatgatttatgatttagagagaattatagttaatgtttgggtatatttagagttatgaattaaatgtttatggggttaggtagttgatataaatgtgaattgggtggtagtaaaattaatataaatgtgtgtatagggtgagttaatttatataaatattaatataaatatgtgaattttgatattaaaaaattaggaatgtttgaatttgtgaagtaatggagaatataaagttaggtgtaaatgaatttaaaagttagagagattttaaatattgatttttattttaggggttattagtttgaaatttttgttatgtatttttttatatttttatgtatgtatgtatatatgtaaagatatatatatatgtatatatatatatatatatagataaatatatatatatatatatatgtatataatattttttatttatttttggtttttgttatttaaggttaattatggtttaaaaatattaaatggaaaattttagaaataaataatttataagttttaaattgtatgttatttttagtagtgtgatgaaattatttttttgtttagtatatttatgttgtatatagtttttgattgttagttatattgtagttggtttaggttttagattgaatgttttggtgttgtagtgtttgtgtttaagttatttttattttatttagtaatagttttaaagtgtaagagtagtgatgttgggaatttggatatgttaaagagaagttgtaaagtgttttttttaagtgaaaagttaagataaaagtttttgatttaatagggaaagaaaaaagttatatgttgaggttgttatgatttgtggtaagaaagatttttttatttatgaaaatgtgaagaaggaaaatgaaatgtatgttaattttgttgttatattttaaattgtaaaagttatggttatagtatataataagtgtttggttaaaatggaaaaggtattataattgtgggtggaagataggaatagaaatgagttttgattgatggtaattaggttgtttggtgttagtggtagtgtttggtatttatagggggttttagaaattattttttgagttaggtatagtggtttatgtttgtaattttagtattttgggaggttaaggtaggtggattatgaggttaagagattaagattattttgggtaatatggtgaaattttatttttattaaaaatataaaagttaa

SEQ ID NO: 4013 - DNA, 2422 bp, Artificial Sequence
  chemically treated genomic DNA (Homo sapiens)
ttgtttaagggttataattttttatggttttaggttttttatatgtaaaattaggataataatgttttttattttatgaggttatttaaaggaaatggtgagattatgtgttttgatagaatatattttaaagtttttattatggtttttgatatataggaggtgtttaggaaatattaggtattattgttattgtaataattaggaaaatttttgttattatttatatgtgatagaattgagggatattagatttggaaagtagttgggttattgttttggatgatttgtttattttatgtttgaggaaattgaggtttagtatgtttgtttaagtttatatagttaattagtggtggagttaagaatagtatgagtttatattgaaaggaggttagttgtgtttatattaattttatttaatttttttaattaagttgttgatttttttagtgatgttatttatttgttttagaaatgagttatataagtgtgtttttttttattatttatttgttttttttgagaagagtattgggttgttttaaaataagtaaagatttgagagaatatttttgttttattgtttttgttttttgttgttgatttatttatttttgggtttttgagtttgtttatattaattatttatttttagaagaatatattgtgtttggttttataggttttgtgtagttggagttttgtaatgttatttttgggaggttttattgtaatgtaaggaaaggttattgttaggtttttttttttgtatagagtatggtatttagttaatgattatgtttagttaaaaatttttttggtttttaaaatttaagttaggtaattttaagaggaatggtatttaaatagatgtgttttttaattatatagttttaaaataattggataaaaagaatatttgttttatttttttattattaggtatttaaatttagttttaaataggtatataaatagttgggtattttaggttgatgatatttatttttagggtaagtggttaattttttttttaagtttgaataataaatgtttaattatttttttattttttttaaatagtaatgtgttttgtatttagtttgtgtttgtttgttggtgtagagttgatattatttgattttattttatagagattttgtgtttgttagatgtttaaataagtggttgatttagggtaaaaatattagttaagttatttgttttatttagttaaagaattagtgtaggtaaagtaggtgagttagtagtttagtgtaggtaaagttgtgtgtttttgaatgatttttttagttgttatttttgggagggttgggtttttggggtatttttaaaggaattgttttgggtttaaggtaatatttttttttagtagtttttttttttttatttttagtggttattttaattattttaataggtaattttaaagttagttagaagtaattttagtttattaagtttgaatgtgaaaaggagtaagtaaagatttgagtttttttttgtttttttttttatgagtaatatgtgattttttaaaaattattgtagtaagaatatttaatatgaaatttatttttttaataaatttttaagtgtatatgagtttttaaaataaaataatttgattttttaatgattgttattttaattggtgtgagatggtatgttattgtggttttgatttgtatttttttaattattagtgatgatgagtttttttttatatgtttgttggttgtataaatgtttttttttgagaagggtttgtttatattttttttttagtttttaatggggttgttttttttttgtaaatttgtttaagttttttgtagattttgtatattagttttttgttagatggatagattgtaaaaatttttttttattttgtaggttgtttgtttataatggatgttagagaggatgtggagaaataggaatatttttatattgttggtgggagtgtaaatgagtttaattattgtggaagatagtatggtgattttttaaggatttagaattagaaatattatttgatttagtaattttattattgagtatatatttaagggattataaagtattttattatatagatatatgtatatatatgtttattgtagtattatttataatagtaaagatttggaattaatttaaatgtttattaatgatagattggataaagaaaatgtggtatatatatattatggaatattaagtagttataaaaaaggatgagtttatgttttttgtagggatatggatgaagttggaaattattatttttagtaaattaataaaggaatggaaaattaaatattgtatgtttttatttataaataggagttgaataaatgagaatatatggatatagggaggggaatattgt

SEQ ID NO: 4014 - DNA, 2422 bp, Artificial Sequence
  chemically treated genomic DNA (Homo sapiens)
gtgatgtttttttttttgtgtttatgtgtttttatttgtttaatttttatttatgagtgagaatatgtggtgtttggttttttgtttttttgttagtttgttgagaatgatggtttttagttttatttatgtttttgtaaaggatatgaatttatttttttttatagttgtttagtattttatggtgtatatgtgttatattttttttatttagtttattattggtgggtatttgggttggttttaagtttttgttattgtgaatagtgttgtaataaatatatgtgtgtatgtgtttgtatagtagaatgttttataattttttggatatatatttagtaatgggattgttgggttaaatggtatttttggttttagatttttgaggaattattatattgttttttataatggttgaatttatttatatttttattaatagtgtaaaagtgtttttatttttttatattttttttggtatttattgtaaataggtaatttatagaatgggagaaaatttttgtaatttatttatttgataaagggttaatatatagaatttataaggaatttaaataaatttataagaaaaaaataattttattaaaaattgggagaaggatatgaatagattttttttaaaagaagatatttgtgtggttaataaatatatgaaaaaaagtttattattattggtgattagagaaatgtaaattaaaattataatgatatattattttatgttagttagaatggtgattattaaaaagttaggttgttttgttttaaaggtttatgtatatttaaaaatttgttaagagggtagattttatgttaggtgtttttattataataatttttaaaagattatatgttatttataagaaaagaaataagagaaagtttaggtttttgtttgtttttttttatatttaagtttgataaattaaaattgtttttggttggttttaaggttgtttgttgaagtagttgagataattattggaaatggggaaggagaagttgttgagagagaatgttgttttgagtttaaggtagtttttttaggagtgttttaaaagtttagtttttttaggaatgatggttggaaagattatttgaggatatgtagttttgtttatgttgggttattgatttgtttattttatttgtattgattttttaattgagtgaaataaatggtttgattaatatttttgttttgaattaattatttatttggatatttagtaaatatagggtttttgtgaaataggattaggtaatgttagttttgtattggtagatagatatagattggatgtagagtatattattgtttaggaaaaataaaaagatgattaggtatttattatttgagtttaggaaggaaattagttatttgttttgagagtggatattattaatttgaaatgtttagttatttgtatatttatttaaaattgagtttgaatgtttggtagtaggaagatggaataaatgttttttttatttagttgttttaaaattgtgtggttaaaagatatatttgtttggatgttgttttttttgggattgtttgatttgaattttaaaaattaaaagggtttttagttggatatgattattagttgggtattatgttttgtgtagaggggaggatttgatagtggtttttttttgtattgtaatgaagttttttaggggtggtattgtagagttttagttgtatggggtttgtgaggttggatgtagtgtgtttttttgaggatgggtgattgatgtgagtgagtttagaggtttaggagtaaatgagttagtagtagggagtagaagtaatgaaataggggtatttttttgaatttttgtttattttgggatagtttgatattttttttagagggagtaaataaatagtggagggagatgtgtttatgtaatttatttttaaaataagtgggtgatgttattgaaggaattaatagtttaattaaagaagttaaatagaattgatgtaaatatagttggtttttttttaatgtagatttatattatttttagttttattattaattaattgtgtgaatttggataagtatgttgggttttagtttttttaaatataaaatgagtaggttatttaaggtaatggtttagttattttttagatttaatattttttaattttattatatataaatagtggtagaagtttttttaattgttgtaatgataatagtatttaatattttttgagtattttttatgtgttaagaattatgatagaggttttaaaatatattttattaaaatatatgattttattgttttttttaaataattttatgaggtagagaatattattattttgattttgtatgtggagaatttgaggttataaaagattatggtttttggataa

SEQ ID NO: 4015 - DNA, 2365 bp, Artificial Sequence
  chemically treated genomic DNA (Homo sapiens)
aatgtaattattaatgttatttgttataggtttaaaatattttattatttttaaaaagaaattttgtatttattaaatagttatttgtatttttttttgttttaagtatttggtaatagataatttgttttttgttgttatggatgtatttgaatatatatttttaaataattgaaaataggtatttaaataaatatttgtatatgaatgaagatttaattttaaatgggtaattttgaaaaaaattagtttgtaggttagttaattttagaaagtgagtttataaagaataggttgggtggttataatgtttattgaatttattaaaatttgtttttattttgtattttagtttagattgtttttagtgttaaaagtagaattagaagattataatggtttttagaaataagatgaattaatatgaatggtgagttttgagtgagttaggttataatttttagtaagaaaaatatagaatttaaattttattgtttttagtttttgttttaattgttttataattgggaaattttgtttttaaatgaatattattggtaaataattttttttaattgaaggtttaaaatgtttgggtaaaattaaaaatgattttttatttaaggtttagtaatagttaaggtatttaaataggagtaggttgaagaattgtttttaggtttggttttagtaaatttgtaattatttatttttttatttagatttattttgaataaagtaaagggtaattaaagtgtattaattgtttattgatgatttaagataaataaaaattttataatttttgttttaaatagtgtgtattgagatatatagagagagagagaaaaaaaaaatagttttttttaggtggtgaataattatttatttattagattttttttaagttaagagttttattgtttatgttaggtttttggatattgtatataaaataaattaagttttattaatttagtggaatatttggaaatattaattttataggtgtatgagagaaaattgtagttttaagtattagagtattattaaatataatatattttgtatgtaggggtagttatttaatattaaattaataaaatattattagtgttggtgagagttttggttgttgatagtaggttaggtgttttatagttatgttgtttttttgtttgtaggttaattttatatagttgtttttttttggaaattatgttttatttgaagtttttgtaagtatgataaatagtttttttaagttttagtgatggtggagaaatttgaaaatatttaggagtatttattaattagaatatgaaagaagatttagtttaattgtagtttttgattgtgtggaggttttgttattgtaagaaatgttatttgtttgggtgtgtatattttttgtaggatattgtgtaaaattattattttgagggtaaagttaagtttaaattgtatagaaattttaatgttgatttataagtggataaaattagaattaagtttttatttttaaatttagttgtttggtggtattgttgatttatatgttgttattttatgtattataaatgttagatagagttttttgtatagggagttttaaatttgtgtaggaatttaggatttataggaaaaagatatagaaaaaaagaaagattaggtgttaattgaattgtttaaattaggtttgtaatatgtaaagtatattgagattaaagttaggagaggtggatttagttgttggagtttgggatgaataatggaggaagggaggatataggtaattggtaggggttaaggatggggtggggtggttttgtgtatataatatgatatattttgagaaaaagtgaattaatatggttaaagtggagagtttatgaaaagtttatggaggtaagtagaaggagagaaatgtagatatattgaatggttttattatagaggtttttgaatattaggataggatatagattttttatttaattataggaaatgtggggtgatgagggttttgggaatatgagtgtgatataagaaggaagggtttggggaaattttattataatagttttttagattaattgatatggagagaattgagaaatgtttagtatgtttagaggattgagtaatgagagatttgtatgaggttggaattggtagtgataaaaaggaatggaatgttttaaagaattatttgaaagagagaaatattttgaaggaagtatttataggatttgagaatttattgggtgtagagagtgatgtgtgggtaggtttaggtggattttgggattttgagtttaggttatttaaataataaaataagaaaatttaaagagtaaattga

SEQ ID NO: 4016 - DNA, 2365 bp, Artificial Sequence
  chemically treated genomic DNA (Homo sapiens)
ttagtttattttttgagtttttttattttgttgtttaagtggtttgggtttaaagttttagaatttgtttgaatttgtttatatgttattttttatatttagtgagtttttaggttttataaatattttttttaaaatgttttttttttttaaatgattttttaaaatattttatttttttttattattgttaattttaattttgtgtaggttttttattatttaattttttaagtatattgggtattttttaattttttttatgttaattaatttaagaggttgttgtaatggaatttttttaaattttttttttttatgttatatttatgtttttaaagtttttattattttatattttttgtagttaaataaaagatttatattttattttggtgtttaagagtttttgtaatgggattatttaatgtatttatatttttttttttttatttgtttttatggattttttatgaattttttattttagttatattggtttatttttttttaaaatatgttatgttgtgtgtatagagttattttattttatttttagtttttgttagttgtttatgttttttttttttttattatttattttaaattttaatagttgggtttattttttttgattttagttttagtgtgttttgtatgttgtaagtttggtttgaataatttaattagtatttagtttttttttttttttatattttttttttataaattttaaatttttgtatagatttgaagttttttgtataaggagttttatttgatatttgtgatatgtagaatggtagtatgtggattagtagtattattagatagttgagtttgaaagtaaagatttgattttaattttgtttatttatagattaatgttagaatttttatgtagtttaaatttagttttgtttttagggtgataattttatatagtgttttgtaaaagatatatatgtttaaatagatagtattttttataataataagatttttatatagttaaaagttgtagttgaattaaatttttttttatattttagttaataaatgtttttaaatatttttaagtttttttattgttgttaaggtttagagaggttatttgttatatttgtgaaggttttaaatgaggtatgatttttagaagaaagtagttgtgtaaaattggtttgtaaatagaaagatggtatggttgtgggatatttagtttgttgttaataattaaaatttttattggtattggtaatgttttattggtttaatattaaataattgtttttgtatatggagtgtattatatttaatggtattttaatatttggaattgtagtttttttttatgtatttgtaaaattagtatttttaaatattttattaagttaataaagtttaatttgttttatgtgtggtgtttaaaagtttgatataggtagtggaatttttgatttggagaagatttgatgggtaaatggttatttattatttaagagggattgttttttttttttttttttttttatgtattttaatgtatattatttgaaataaagattataaggtttttgtttattttgagttattagtgagtgattaatgtattttggttattttttgttttgtttagggtaagtttggatggggagatgagtaattgtaggtttgttaagattaaatttgaagatgattttttagtttgtttttgtttgaatgttttaattattattaaattttgggtagggagttatttttagttttgtttagatattttaagtttttaattagaaaggattatttattaatagtatttatttgagggtaaaattttttaattataaaatagttaaaataaaagttgaaaataatgaaatttggattttgtgttttttttattgaaagttatgatttggtttatttagaatttattatttatattaatttattttgtttttagaagttattgtgattttttgattttgtttttggtattaagaatagtttgaattaaggtataaaataaaaataggttttaataaatttaatgggtattgtggttatttagtttgttttttatagatttattttttaagattaattgatttatagattgattttttttaaagttgtttatttaaaattggatttttgtttatatgtaagtatttgtttgaatatttgtttttaattatttgggggtatatatttagatatatttatggtaatagagagtaaattatttgttgttaggtgtttggggtaggggagagtgtaagtgattgtttaataggtatagggtttttttttgggggtgatgaaatgttttgagtttataatagatagtattaatagttgtatt

SEQ ID NO: 4017 - DNA, 2356 bp, Artificial Sequence
  chemically treated genomic DNA (Homo sapiens)
tatgtaatgggaatgtttttatttattgttataaatattataggagttataatttaattttttaatgaattattattttgaaatagtaggtagttgaaaagataatttgtagggatatgaggaagtgtttatgaaattttaaggttatatattttattattattttagaaatagtatgtttgtagtttattttttgtaaatttaagaaaattttataaaatttttatgagattgagtgatttaaaatttttttttttttaggtttatgtaaaatttttataggtgatttaaaaatgtaaattttgatttatgggataagtagaattttttagattttgtagttggtttgagtgttagtatatggtttatagtattaaggtgaaatggagaaaaaagtgtgaaaagataaaagataatttatgtgagttttaggatgaaatttggaaaaaaatttagtttttatttttttaatttaaatagttattaaaagattaatgattatataatatagtattaaaatatttatgtataaatatatatattttttattattttatttatattatgtatgtgatttttgtatataaaatataaaagaatgttagaaatagtaaagttgttaaggttatatagagattgttattttagatgatttaaaaaattttaatgattgtatatatagatttgagagatgtagaggtatatagttgtagttttagaatttagttttatttattatttgtttgttagtattatgaattttggttgagagttgttttgtagatttgagaattttgtttttttttttaagtattttgggttgagttttttaggggattaatggaatttagaagtaatgtttttttgtttttaaatttggggtaaaataagggtaggttattaattttaaggtaggttattaatttagttatgggttttttatatgtttttgtttgtaattgtgtggtagattagatatttagttatttattttttgtaagggaagttatttaatgtagatgtttaaggaattttatgtttaaatatggttattgttgaatttgatgggagaaaaaaaggattgtatttttgttggttaatgtggtatttttggatgtttattaagttgttaaaaaatgtgaaatgatgatttattgtgaagtttttttaatttttttttttgttttaatttgtttgtggtttgaaggaatgtatattgatttgagttaaagaagaaatttgtggtttttattatagtttgtaaatattgattgttgaaagttttaagtgtgttattattttttgttatatatatgttttatatatagtttattttggaaaatagattgggagagtattgtgtttataattttagagtaatttaattaatggggggttggtttgtttgggggttttgagattattattgttaatagtggaggttttttttgatgttttttaagttaaagtattaagagagaagttaaagataagttttattaaagaaagatttttttggtatttatagtggttttttgttgttttattattagtaaaagagatataaaaaaatttttgttttttttttaggttgtatttttaggttttatttttgatgttattgaaaagttggtttatttattatttttaaggttattggtaatgttattatttttgattaatgattagtttatggttaagtagtattttatggttaggtgatggttatattgaaagtttagattttagtattatgtaatatagttatgtaataaaattgtatttgtattttttaaatttatttttaaaaagtttaatttaattatgtaggagtggtagtagaatgtaaattatttagggaattattttggtagtgtttgatggatttaaataatattaagagaaagattgtagagggtattttgagatttgtatgatattttgattagggttgataagaagagttaaatggataagttttttttggaaggagatattatggatgtggtatgggtagaaaaagtataagatgtagtattagaggatttgaatgtgttttttggttttgatatttagtggttttgtgatttagggtattgttttttagatattaatatgggtatatattatttggggggtttgttaaatgtagattttgatttagtaggtgtgggtggggtttaaggttgtttattttggttattttgtatttggttgtgagaaatagagaatttggtaaggtttttaatttatgtaagttttagttttttttttaataatatggggtttagaatgatgttaattttttagggttattgggatttatggtattggtaagagtttttggtataggtat

SEQ ID NO: 4018 - DNA, 2356 bp, Artificial Sequence
  chemically treated genomic DNA (Homo sapiens)
gtgtttgtgttaggaatttttattagtgttatgagttttaataattttggaaggttggtattattttaaattttgtgttattaaagaagaaattgagatttatgtgggttaggagttttgttaggttttttattttttatagttaggtgtaagatgattagggtgggtagttttaggttttatttatatttattgaattagaatttgtatttaataaattttttaggtgatatgtatttatgttaatgtttaagaagtagtgttttaggttataaagttattgaatgttaaagttagaaggtatatttgaattttttgatgttgtattttgtattttttttatttatattatatttatgatatttttttttagaagaaatttatttatttagttttttttattaattttggttaggatgttatgtaaattttaggatattttttgtagttttttttttggtattatttaaatttattaggtattattagaataattttttggatggtttgtattttgttgttatttttgtataattaaattaaattttttaaaaatagatttagggggtataaatgtaattttgttatatggttatattatatagtgttgaaatttgggtttttaatataattattatttaattatggaatattatttagttataaattaattattaattaaaaatgatagtattgttagtggttttggaaataatagataaattaattttttaatgatattaagaataaggtttaaggatataatttaaaagagaagtaaagatttttttatgttttttttgttgatgataaagtagtaaagaattattgtgggtattaggaagatttttttttaatgaggtttgtttttggttttttttttgatattttggtttaaaagatattagaggggatttttattgttaatagtgatggttttgagatttttaggtagattagttttttattagttgggttattttggagttgtaaatatggtgtttttttaatttgttttttaagatgaattgtatataaagtatgtgtgtggtaggagatgatagtatatttgaggtttttagtaattgatgtttatagattataatggaaattataagttttttttttaatttaagttagtatatatttttttaagttgtaggtaaattggagtagggaagggggttgggaaggttttatagtgagttattattttatattttttaatagtttaatgaatatttagaaatgttgtattagttagtaaaaatatagtttttttttttttttattaaatttagtaatgattgtatttggatgtgggattttttgagtatttatattaagtgattttttttatagaaggtaagtgattaaatgtttagtttgttatatagttataagtaaaagtatatgaagagtttataattaagttaataatttgttttgaagttaataatttgtttttgttttgttttaagtttgggagtagggaaatattatttttaggttttattaattttttgaaaaatttagtttagagtgtttggaaaagaagatagaatttttagatttgtagagtagtttttagttaagatttatggtgttaatagatagatggtaaataaagttgggttttaaggttatagttgtgtgtttttgtattttttagatttatgtgtgtgattattaaaattttttagattatttaaaatagtagtttttgtgtaattttggtaattttgttatttttgatatttttttatattttatgtatagaggttatatgtataatgtgggtaaaataatgaaaaatgtgtgtgtttgtgtatggatattttaatgttatattatgtagttattagttttttaatggttgtttgaattaagaaggtagaaattgagtttttttttaagttttgttttgaggtttgtataaattgttttttgtttttttatgtttttttttttattttgttttaatattataggttatatgttagtatttaagttaattataagatttgaaggattttatttgttttatgaattaaaatttgtatttttagattatttgtgagaattttgtatgagtttgaaaggaaagaggttttgaattatttagttttataagaattttgtaagatttttttgaatttataaaaaataaattgtaagtatattatttttggaatgatagtaggatatgtaattttgaaattttatggatatttttttatatttttatagattgtttttttagttatttgttattttaaagtagtaatttattaaaagattgaattataatttttgtaatatttgtgataatggataaaaatatttttgttatata

SEQ ID NO: 4019 - DNA, 2474 bp, Artificial Sequence
  chemically treated genomic DNA (Homo sapiens)
aagtttttttgtaaatatttataattttatataatttattattatttattaggtatattttttaatttatatgttttgaaatttttaaattttgaaatgttagaagtaaatttgggaattatttagttttattatttatttaatgatgaaattttaaattagatatttttttagttgattgattgataagttttttatttttttttaaaaataatgtttttttataagtttttttaaattatttttatttatatttattaaaagtagtaatgaagttaagggttattgttttgggtagatgtttgtggatattagatttttaggaagattaagtttaggaatttagttttggaggtttaaattttttggaagtaattatatttatgtttagtttttttagatttatgagtttaaataaaaatttttttttgaggtattatttttttgtttgtagttattattagtatttttgttatagtaggttattttttttgttgttttttttgttagttttattttttttgaaatatataaaattgtttgggatataaaattttttttttttttagttttgtgatttggattattttttattatatattgaatttttttgtattttttggaagtttgatggtttgttttagaatttagtaaattgggtagagtggattttttaaaggtaagtgagtattgtgagtattatttttttaaggtgaagagtgtttttttatttagagagtattgattttgagaagttatttattgtttttgttaaagtagattttgagtttaggtgttttttagatgtgattttgaagttgagtttttttattttttaagtttgattttggataaattgttggattttttttattttttgttttgtttttttgtgtaatgggaattaggatgttgagtttagtggttgttatgagagtttattgaagtaatgtgaaatatttagtgtagtgtttggtgtttagtaggtattttatagttttgatgtttttggggtaggtttattttagaagttttaagaaattttaaaatgagttttatgatgtttgttgtgtttggatataaaatgagaaatagaaaatttgtttttttattttatgggtggagtgttgtttttttatattttaattttttttaataagaaaagggtgttttgaatgtggtgggaaagggtagattatatggtgggaagttatgtaatataagatatattttattgtatggtgtgtttttgtattatagatgtgtatatagatgtgattattaatagagataattagtttataagttttttttggaaattttttattgtttttagtagaaaagtgatttttagttaaggtttgagttgaagtttagtttatgattaaagtatttttaattgttttatattgaaaagaaagaaaagagaaatgattagtagtggttttttagttaaggtgtgagattagaggttatttaaaaggtttaagtttattaaaataagtatttgttgtggttttttttttttgttttttttttttttttttttttttttttttttttatttttatttttattttttttttttatttatttttttattatatatttttttttttttgtttttttttttttttttttttttttttttttttttttattttttatagaaaaatattattttatgttaaggaaatattgagtaatatttatttattgttgagtttgttaatgtggagagggtatatttgtttattttttaagttgtgtaattttattattattatttttattggtgatatgtgatggaagttttatgtaaatgtttaaagtagtagtttagtataataaatataatttttttaggatttaaggaaaaatttgagtttaattttggtttataatttttaattatgtagtatttttaaatatagtagttttgtggattaaataaaataaatgtatgaatataaggtatttttataatatatatggaattatagtttaagttttattttttataatagaagtagggtttgagaaatagatttaggtgtatgttattttgggtggtaaatattttaggaggaaggggagtgaaggaagtagatggagtaggtggaggagttgagtttaggatgtggttttttttggagtttggatttattttaattttatagagagttttggagtgtgaattatatatatgaagtttgtttttattttgatgtggttggttggttttttgtattttttatgtttattagtttttgtaggtgggttgtttttgggttgggggtggtgaggtaattttttaggtaaatgtttaagaggaaatttttggagaagggggtagttatgagttattagtagtttttgtttgtagtatttggggtagaggtattagtttggtaaagggtgttggttgtgatattagtagtatttattatggggtttaataaatggtagttaaa

SEQ ID NO: 4020 - DNA, 2474 bp, Artificial Sequence
  chemically treated genomic DNA (Homo sapiens)
tttagttattatttattgagttttatagtggatgttgttgatattataattaatgttttttattagattggtatttttgttttaggtgttgtaagtggaggttgttaatggtttataattgtttttttttttagagatttttttttggatatttgtttgggaggttattttgttatttttagtttaggggtagtttatttgtaagggttaatggatatgaagaatataaaagattagttaattatattaaggtaggaataaattttatgtgtgtaatttatattttagagttttttgtgggattagggtaaatttagattttagaagagattatattttaagtttagtttttttatttgttttatttgttttttttattttttttttttttgagatgtttattatttaaaatgatatgtatttgaatttgttttttaggttttatttttattatagagaatgagatttaagttgtagttttatatgtattatagagatattttgtatttatatatttattttatttagtttgtagagttattgtatttgagaatattgtatagttgagaattatgaattagggttgaatttaggtttttttttgaattttaaaaagattgtatttattatattaaattgttgttttagatatttgtataaaatttttattatatattattaataaaaataataataataaagttatataatttagaaagtaaataaatatgttttttttatattaataggtttaatgatgagtagatgttgtttagtgtttttttgatataaggtgatatttttttatgaagaataaaggggaaggagagaggagaaagaagaagaagagagtaggagaaaaaaaatgtatgataaagaaataaatgaaagaagaaagtagggatgaaggtaggaaaaagagggagggaaggaaggagggaaaggtagaaagaaaaggttatagtagatatttgttttaatagatttaagttttttaggtgatttttggttttatattttggttggaaaattattgttggttattttttttttttttttttttagtgtggaatagttggaaatgttttaattatgggttgagttttagtttaggttttggttgaaaattatttttttattaaaaatgatgaggagtttttagggagggtttgtaaattagttatttttgttgatgattatatttgtgtgtatatttgtggtatagaaatatgttatgtaataaagtgtattttgtgttatatgattttttattatgtggtttgtttttttttattatatttaagatgttttttttttattaaaaagaattaaaatatagaggagtaatattttatttatagggtgagaaggtagattttttgttttttattttgtgtttaagtatggtaaatattatagaatttattttgagattttttaaaatttttaaagtaagtttgttttaaaggtattaaggttgtagaatgtttattaggtattagatattgtattgaatattttgtattgttttagtggatttttatggtaattattgaatttggtattttggtttttattgtatagaggggtaaagtaaagagtgaaaaaggtttaatagtttgtttaaaattaggtttaggaaatggagaaatttagttttagagttatatttaaagaatatttgagtttaaggtttgttttagtagaaatagtaagtgattttttagggttagtgttttttgaataagaggatattttttattttgaaaaggtgatatttataatgtttatttgtttttgaaagatttattttgtttaatttgttgaattttagagtaagttattaggtttttaaagaatatgaaaaggtttagtatgtgatagagaatagtttaaattataaggttgaggagaggggggattttatattttaaataattttatgtattttaaaaaaagtaaaattagtagaaaaggtagtaagaaaaatgatttgttataataagagtattaatgatgattataaataaaagggtaatgttttagaagaaggtttttgtttgagtttatgggtttaaagaaattggatatgaatgtggttgtttttaaggaatttagatttttaaagttaaatttttaaatttggtttttttaggaatttgatatttataggtatttgtttagaatagtgatttttgattttattattgtttttagtgaatgtgggtaaagataatttaaaggagtttgtaaagaaatattatttttaaaaaagagtagaaagtttgttaattagttaattaaaaaagtatttgatttgaaattttattattaaatgggtggtagaattaaatgatttttaagtttatttttaatattttaggatttggggattttagaatatataagttagaaaatgtatttgatagatggtaatagattatatggggttataaatatttgtaaaaaaattt

SEQ ID NO: 4021 - DNA, 2412 bp, Artificial Sequence
  chemically treated genomic DNA (Homo sapiens)
agggagttttaagaaggaaatagtggttggtaatttttaaattatggaagtggtttaagtttaaaaaatattttggttgttgtagttatttggtttttagtaagattttttgtaggtgtttgagtggaggaaaagatggaaggtgtagaggatgatattggttttttgtttatatttttttggaagttatttgtatattttaaggattgtttattatgaatatttgtaattttttgtttggggtttttatttatttttattattttatggttgaagagtatttttagtttaagtatagagtaagttaaaatgatagagagtttatgtttttagatagttttgaaataatgataaatagatatttgataattaaatattttaatttattggtttttagttggaataatgttgaagaatgttttatattgttttttagagttttttagagggattaattggtttgataatttttaagaatttgttgttttgtttttttttgatatatttttttatttttttattagtgtttttgggaattatttattaaataaattatttatttttgaatttttgttttagtggttgtttttgggaaattaaaattatatagaagaaaagagttagattagtaagtataaatttagtgagaatagttgaaaaggagtattaggaagagaaatatagttaaaaatggtttattataattaagaaagagtgttaagtttatttgattgagggtggaaggaatataagagatagaggggagagattttataggaatttatatgtagaaatatttttttttttgatgttgttggttaaaatataaaaggagaaaaaagaaaagaaaaaataataaaatttgtattataaaatttaggaaatttttttttagataagataaaggtataaaagttttttttttaaaagtataaaagaagttttgatgtttttggatttttgtgtgtttaggaatttttattatttttagaatttgtttaattattttatgatatatttttttttttttagatgtaaaaattgaggagttagttgttagttgaatattttagtattatttttttagtaattattttaaggaatgtatttgaataaaatgtagttttggtattattttaaaaaatggatgatgatttatgttttttttgtggggataagatggttgtgggtatgagttatgattgtatgttgggaagattttgatgggaattttgtttttgttggttgagttataatttatatggatttgagattgtgtgtggtttttattaatatgtttattttgtttgttaaggtttgagttttatttttttttttttgattaaagttttgtttgtattttatatatatttgatttaaaatttgtgtttggaatttagagtggtttgggaatagtaatttggaaaaatttgattatttgttagttaaaatggaatgatgtgtttttagttgtagttgggaaatgggttatttttttgtaggggagtaaatttaaatgatagataaagttttaatttttttaatatttttgtttttgtggagtaggtttggtataaattaaaattgtttataggttaaggaaggtataaattatagtatagatttgtgttttttttaattgtataaagagtttttatatataatttttttggtgaaaaatttttgttttggagtagatgttttatggaaataatagtgaagtttttaaggggttaaggtgaatgaattgtaagattggtttttgaagttttttaggttaaaattattttttttattgtttttggaattggtttttaaaatgtgttttatagtattgttttttagattttaatatgtatataaattatttggggattttgttaaattgtagattttgttttagtagtttttgtgtggggtttgagatgtatttttgataagtttttaggggatattgatgttgatttatgtttatttttgaattttattttgagtggtgagtaatagagggatatagaaagttggttttgaaagattttttttaatataaagattttttagtttaataagtttaaaaaaatttatatttttgtttttttttttagaattttgtaaattaataaattaaagattttgagaagatttgtattgataaagtttgtagttaatgttgttttttaataatttatggaatttgattttgtgaaaggaaaggataatttgatgtgtgttatttttgggaatatttgtttaggtatttaaatagattgaagggggattttagaaaatgtttgattttttttgtggtgatttttgtaattttttttaggtgagtgttattgtttttttaaataagtaagattttaagtttagtttttaatatttttagtagaataataaattttttattta

SEQ ID NO: 4022 - DNA, 2412 bp, Artificial Sequence
  chemically treated genomic DNA (Homo sapiens)
taggtggaaagtttattattttattggggatattgagagttggatttagaattttgtttatttggagaagtagtaatatttatttgagaaaagttgtaagggttattataaagagagttaaatattttttgaaatttttttttagtttgtttaagtgtttgaataaatatttttaagaatagtgtatattagattattttttttttttataaaattaaattttataggttgttaggagatagtattgattgtagattttattagtgtaaatttttttagagtttttaatttgttaatttgtggaattttagagagaaagataaaaatgtgaatttttttgaatttattagattagagaatttttgtattggagagaattttttaagattaattttttatatttttttgttatttgttatttaaagtaggatttagggataaatatagattggtattagtattttttgggagtttattaaaaatgtattttaagttttatataagaattattgaaataaagtttgtaatttaataaaatttttaggtgatttgtatgtatgttaaaatttgagaagtaatgttgtaaaatatattttgaaaattagttttaaggataatgagagagatggttttaatttggaaaattttaagaattagttttatagtttatttattttggttttttaaaaattttattgttgtttttatggaatatttgttttgggatagggattttttattagaaaaattatatgtgaaagttttttatgtagttgagaaaagtatagatttgtgttatgatttgtattttttttggtttataaataattttgatttgtgttaaatttgttttatgaagatagggatgttggaagagttagaattttgtttattatttgaatttatttttttgtagagaaatagtttattttttagttgtagttgagaatatattattttattttaattgataaataattaaatttttttaaattattatttttaagttattttgggttttaagtatagattttgaattaggtgtgtgtgaaatataaatagggttttagttgggaagaaaaagatgaagtttgagttttaataagtaaaatgaatatgttaataaaagttatgtatagttttaagtttgtgtaagttatggtttaattagtaaaagtaaggtttttattggaatttttttagtgtatagttatgatttatgtttatagttattttgtttttgtaagaaaagtataaattattatttattttttaaaatgatgttaaaattgtattttatttaaatgtattttttaaaataattgttgagaaaataatattagagtatttaattgataattgattttttagtttttatatttggagagaaaaaaatgtgttatggagtggttaaatggattttagagatggtggaaatttttaaatatataaaggtttaagaatattagaattttttttatgtttttgaagaggaaatttttgtgtttttattttatttagaaagaggttttttaagttttataatgtaaattttattattttttttttttttttttttttttttatattttaattaatagtattagaaaaaaaaatatttttgtatatgaatttttataaaattttttttttttgttttttatattttttttatttttagttaaataagtttagtatttttttttgattataataagttatttttgattgtgtttttttttttgatatttttttttagttgtttttattaagtttatatttattggtttaattttttttttttatatgattttggttttttagaagtagttattgaggtaaggatttaagagtgagtaatttgtttggtaggtgatttttagaaatattggtaggggagtagaggagtatgttagagaaagataggatagtaagtttttgaagattattaaattagttgatttttttggggagttttgagagatggtgtgaaatattttttagtattattttaattgaggattagtggattgggatatttagttattaaatatttgtttgttattgttttagagttgtttggggatgtaaattttttgttattttggtttgttttgtgtttaggttaagggtattttttagttataaaataatgaaaataaataaaagttttaagtaaggagttataggtgtttataataagtagtttttggaatatgtgagtgatttttagagggatgtggatagaagattaatattattttttatattttttatttttttttttatttaagtgtttgtaagagattttgttaagagttaaatggttataatagttagaatattttttaaatttaaattgtttttatagtttaaagattattagttattattttttttttgaagtttttt

SEQ ID NO: 4023 - DNA, 2464 bp, Artificial Sequence
  chemically treated genomic DNA (Homo sapiens)
attttttatgattatgtagtgttttatttagaggattttagtgttgttattagagtattttgtatatattaagtgtttaataaatgatggttgaatgtagaataaaattattattgatatttttttttttaatttttaagggtatggtataagttttaataaatattaggtgatttttattgaaaataattttattgtataatttataaagtgtttaagtatttattattttatttagtttttattatagttttataagttaagtagttttatttatattttaaggtgagaaaattatgtttagagaagttagatgatttgtttagggttattaataaataagatattatgaagggaatgaatttaaatttggtgtttttgtattatttattttttgtgtagagttgattggttaaaagtttgttttttatttataagttaaggtgttaggtatatagttttgaatgttgagttttaggtttttaatgagtaatttgtattataattaaatagagttgtttggttattttaggttagtatttatggtatttatatttatgaatttatttttttttttttttataaatttataggttgataatttttttgtgtgaaaatttattgaaatgagattattttatttttgttttttgatttttggtgtgtttttttgtttttgtttaaaatatttggttttgttttgatattaagttttagtgttagttttgtgaagatgtaagatagaagttatatatgtataataatataatttatatttttaaagttataataagtagtaatatttttggagtgaaaaattttggtaaagtaaataatatatgttttggggtttgagatttaggtttgaggtttagttatagtatttttatgttttttttgatttaagttaaattatttagtttgttgagattttagttgtttttttttattttggataatgggtatgatgttgattgtttttttgggtggttttgaggattttgggaggatggatataagtgtaatttaaattttggagttttttataattgtaaggtagtattatttatttaaatataaaaataggttattaagtattattaaagggaaaagtaaatgtttagggattatttttgttgtattgttgttggggaaagaggttttttgtttttttaagagtttttagatatatttttagttatattttaaaagtttttttagttgtgtagtttaggtgtatttggtagtatagttgtgttttgatttttttggtagatgttataatttattgttatttttatgtaggaatgtagggtgaggggtttttatgttggttttgtgatttattgtttgataagttttgagtgttaattttaggtaggtttagtggaggtggaatattatttatttgatagtgtttgtgataaagtgggtaattagatgtatttggaaaagtttggttggaaattggttggtatttatataatattatagttaagttaggttttataaaagttaatggagaaaaatgaagttttttaagatttattttgttttttgaggaagttaggaatataggattttgtagttttatttttttttgtgttttttttatttttttattttattttttttagatagggtaatatatttttattggagatgggagtaaaggaaagtgaattgagagttgaggttttaagtgtttgattttagaggtatgttatttttttagtttttaatttttttttttttttttttttttgttttttttttatatatatatatgtatatatatatatatattttatatttttatagagtatatatattttatatttttttgtttttttgtttttgttttttttttatatatatgtgtgagtatatatatatataattatagtgttaggatttaatttggtattttggtttataatttgttttttattggagtttttggagtttggtgttagtttaagagtatgatttgtttgatatgaattttatagttttttttttatttttttttaattggatagttttagtttgttgatgattaatgagtttggaaggtgagtgatagttattttaagggtttttaaaagtttattttagagattagttaaatttttttgttatattaattgtagtgaagttttttgtttaatagtttatggaaaataattgtttgatttttgttttttttttaaattaagttgttatgagtgtagttttgtttattggttaatagtgtgtatgttttttttattgtttttttttaggtagatgaatattttatttatgagaagtaggaagtttattgtgaggttggtttaatattggattttatttggatgtggaggatttttgaaattggaaagttaggattgatttggaaaatgtgtttatagatagtggaataggaaaatgatttgttttttaaggttagtttttttttttt

SEQ ID NO: 4024 - DNA, 2464 bp, Artificial Sequence
  chemically treated genomic DNA (Homo sapiens)
gaggaggaggaattggttttggggagtgaattatttttttgttttattatttgtaagtatattttttagattagttttgattttttaattttagaaattttttatatttaaatgaggtttagtattggattagttttataatggattttttattttttataggtaaaatgtttgtttgtttgaaaggaagtgatagagagaatatgtatattgttggttaataaatagagttgtgtttatggtagtttggtttggggggggggtgggggttaggtagttattttttatgggttgttaaataggaaattttgttgtagttaatgtagtaggagagtttggttagtttttgaaataaatttttgagagtttttaagataattgttgtttattttttagatttattaattattggtaaattgaagttatttagttaggaggaaatgaagagagggttgtagaatttatgttaaatagattatgtttttgaattggtattaaattttagaaattttagtgagaggtaaattgtaagttaaggtgttaagttaaattttagtattgtgattgtgtgtgtgtgtgtttgtatatgtgtgtgagagagagatagagatagaaagatagagaaatatagagtgtgtatattttatagaagtatagagtgtgtgtgtgtgtgtgtatgtgtgtgtgtgagagagagatagagaggaggggaagagagaggattgaagattaaagaaataatatgtttttgagattaaatatttaagattttaatttttaatttgtttttttttatttttatttttaatgagaatatattattttgtttgggggaaatagagtgaaaaggtgggagagatataaaaagaaataaagttatagagttttgtgtttttgatttttttagagagtaaggtagattttgaaggattttatttttttttattaatttttatgaagtttgatttggttgtaatgttgtgtaaatgttagttagtttttagttaggtttttttaagtgtgtttaattgtttattttattataggtattattaggtaaatggtgttttatttttgttgggtttgtttgaggttgatatttaggatttgttaggtaatggattatagagttggtatgggggttttttgttttgtatttttgtatgggggtgatagtaaattatgatatttgttaggaagattagaatatggttgtgttattggatgtatttaagttatataattaggaaggtttttaggatgtgattagagatgtgtttgaaagtttttaaagggataaagagtttttttttttagtaatagtgtagtagagatgatttttgaatatttatttttttttttgatgatgtttaatgatttatttttatgtttgagtgaataatgttgttttgtagttgtaaagggttttagagtttaagttgtatttatatttatttttttaagatttttagaattatttagagggatagttagtattatgtttattgtttaggatgaaaaaaaataattgagattttagtaggttgagtgatttggtttgggttaaaaagaatatgagagtgttgtggttaggttttaaatttagattttaaattttaaaatatgtgttgtttgttttattaagattttttgttttaaaagtgttattgtttattgtagttttggaagtatggattatattgttgtatatgtatagtttttattttatgtttttataggattgatattgaagtttaatattaaaataaaattaaatgttttaaataagaataagaaagtatattaaaaattaagaggtaaaaatgagataattttattttagtgaatttttatataaaaaaattgttaatttataagtttgtaaagagaaaagggggtaggtttataggtgtaaatattataaatgttgatttaaaatggttaaataattttatttggttataatataaattgtttattggaggtttgaggtttaatatttaagattgtatgtttggtattttgatttgtaaatgagagatagatttttgattagttaattttatataaaaagtggatgatgtaaaggtattaaatttgaatttattttttttatgatgttttatttgttgatgattttgagtaagttatttaatttttttgggtgtaatttttttattttaaaatgtggataaaattatttagtttgtagaattgtagtaaggattaaatgaggtagtggatatttaagtattttgtaaattatatagtaaaattatttttagtagaaattatttggtatttattgaaatttgtgttatgtttttggggattaaaaaagaaagtgttagtaatgattttattttgtatttagttattatttattgagtatttggtatatgtaaggtgttttaataataatattgggattttttaaatagaatattatatgattatggagagt

SEQ ID NO: 4025 - DNA, 2429 bp, Artificial Sequence
  chemically treated genomic DNA (Homo sapiens)
tataaatatttatgtttatgggttgtttatatgtgtatttatatatatatgtatatattattatgatagtttaataggaaagatttttgtatattataaaatttagatttattattaattttagttttatgatattgattagaaaggaaggattagaaataatggttttttttagttttagattgggtgatttttattatttatgtatattttatttgattggtataatatagtggagtatatgagtaggttatgtatataatttttttttttttttttgaaggttaagtatataagaatataagagtgaagttttaaaagattttgtagataaatgattgtaataagatgattattgatatttaggtatgttttaaaaggatagaaatttaatttgttgttttttattgtattgtttttttaatatttatttaattgtttttattattaaatatttataattaattgattgtatgaagaaagtaagaaataagtgaataaaaaatatgtttatattaaatgatatatataaagtataaaataatgattagttagattataaatattttagtttttgtagtttatatagtttttgttgtaattagttaattttattattttagagtaaaaataggtatggataaagtataaataagtgagtgtggttgtattttaataaaatattgtttattaaaatagtttataggttgaatttattttatgggttatgttttgttaagagttgatttaaggtattaagggtagttttttatttttaaaataaataattagtttataggtattttaataatttgtaagattttatgaaaggattggtttagaggaaatataatttatttaaattttttattgataagttattagtatatagatggtgtataggattaagtaggtttttagatttttttttttttttgttattaaattttttttggttttgttgtattttatgagttatttttgtttttagtttaatatgaggaaaatgggtagatggtataagaggatattgaatgtattgaaggtagtttaaatattttatgtattagttattttggatatttagtggagtgaatgtggtatttattaatgtttaatgttggtttgggtaaagtttagatagtttgttggtagtaagaaagttaaaggtaagaaggtttgtgttgattgttgtttgtatttatgaggttgagaaatagtagttatgaattagtttgtttgagattttgttgttattatttgtagtagtaaggaagataatattttaaaaagtttttaggaataaaatgagttttaattattagaggaagaattatagtttgtagttatattgtttagaggtttaatgatgatttattgtaaattagattaattaagaatattttttatattgtagttttgagtggtttagataagattattggttttttttgatttttgggattttaaaataaatgggattttagagatttttggtttagggtttgtggaatgttagaagtatgaggtattttattggagatttggttaatttatttttttatagatgtgtaaattgagttttggtgaggtaaatgatatttagtgatttataattagttggtggtgaggtagaaattgagttagtatttttgattttgggttgatagtttgatttttttattaagataattgttatgtatttaattaatgtagtttgtatattgttttttaaagtgattttattagagaattttttttgtttttttatatggtttagagaagattagagttttttagaatttattttaggaaattttttaatgattatttgatatttttaagtttttttaattttatttatatatgttgtttttaagtttggaaaatgagatttaaagagattaggttgttggtttttgattttgtttgtatattagaagtatttatagattttttaaaaattttaattttaagttatatttagattaataaattataatttttaggggtaggatagagatattatattttttgatgttttttaggtgattttaaagtatagataaattttgggagttattgggatagggtatttttatttttgttatattttatataggaaggtattatttattatggtgaaaatatgatttgaggatattagaagagatggaataatattttttgaaaggatgttttgttattattgtgaatatatattagagtagttttgaagaataaaggaataaatataggtgaaagtgttttagaaaattgaaggatttatataatatattttttttttattttaggaggtatttagatttgagttagttgtgaatgttgttttatttaattatttattaggaagaattattttgaaattagagaattagtaaatttttaaaagtatttaatttttgaaa

SEQ ID NO: 4026 - DNA, 2429 bp, Artificial Sequence
  chemically treated genomic DNA (Homo sapiens)
ttttaaaagttaagtgtttttgaaaatttattgattttttgattttagaataattttttttagtaaatagttagataaaatagtatttatagttagtttaagtttgaatattttttaaaataaaagaagaatatattatataaattttttagttttttagagtatttttatttatatttgtttttttgttttttagaattattttgatgtgtgtttataatggtggtagggtatttttttaagaaatgttattttattttttttaatgtttttaaattatgtttttattataatggatgatgtttttttatgtgagatatagtagaggtagaaatgttttgttttagtggtttttaaaatttgtttgtattttaaaattatttgggaaatgttaaaaaatatgatgtttttgttttgtttttggagattgtgatttattggtttgggtgtggtttggagttggaatttttaaaagatttgtaggtatttttaatatataggtaaggttaggagttaataatttagtttttttggattttattttttagatttgaaaatagtatgtgtgggtggagttgaaagggtttgaaggtgttgggtagttattaaagagttttttgaagtaggttttggagaattttggttttttttgaattatgtgaggaaataaaaggggttttttgatgaaattattttggaaaataatgtgtaaattatattggttgaatatataataattgttttaataaaagaattaaattattaatttagaattaagagtgttggtttaatttttattttattattgattaattatgaattattggatgttatttattttattagagtttagtttatgtatttgtaaagaaatgggttgattagatttttagtgagatgttttatatttttaatattttataagttttgaattagaaatttttgagattttatttattttaggattttaggagttaaagggaattaatgattttatttaagttatttaagattataatatggggggtatttttaattggtttaatttgtaatgaattattattaagtttttaggtaatgtagttgtagattgtgattttttttttagtggttaagatttattttatttttgaaagttttttaaaatattattttttttattgttgtaaataatgatagtagagttttagataggttgatttatagttattgttttttagttttgtaagtatagatgataattgatataggtttttttgtttttagtttttttgttgttagtagattgtttggattttgtttgggttgatattgggtattaatgaatgttgtatttattttattggatatttgaagtgattaatgtatggaatatttgggttgtttttagtatatttaatgtttttttatgttatttatttattttttttgtattaggttggaaataagaataatttataaaatatagtaaggttaaaaggaatttagtggtagggaggagagaaagtttaaaggtttgtttggttttgtatattatttatatattgatgatttgttagtagaaagtttgggtgaattgtgttttttttgagttgatttttttatgaagttttgtaaattattaaaatatttataagttaattatttattttgagaataaagggttgtttttgatgttttaaattagtttttgataaagtatgatttatgggataaatttagtttgtagattattttagtaaataatattttattggaatatagttatatttatttgtttatattttatttatatttgtttttgttttaaaatggtagagttgattagttgtaatagagattgtatgaattgtagaagttaaaatatttatgatttaattgattattgttttatattttatatatgttatttggtatagatatattttttatttatttattttttgttttttttatgtaattaattaattataggtatttaataatgaaagtaattaagtaaatattaaagaaataatataataagaaataataaattaagtttttgtttttttaaaatatatttaaatattgatagttattttattgtaattatttatttataaaattttttagaattttatttttatgtttttatatgtttggtttttagggaaaaaaaagagaattatgtatatgatttgtttatgtgttttattatattatgttaattaaataaaatatatataaatggtaaaaattatttaatttaaagttaaagagaattattatttttggttttttttttttagttaatgttataaaattagagttggtgataaatttaagttttataatatgtaggaattttttttattaagttattataataatatatgtatatatatgtaaatgtatatataaataatttataaatatgaatatttgtg

SEQ ID NO: 4027 - DNA, 2431 bp, Artificial Sequence
  chemically treated genomic DNA (Homo sapiens)
tatagatgagaaatttgagatttggaaagtttatttatttgtttgaaatggataatggtaaagttatgattaaatttttaagttttaagattttgtttaattttttagtgttttggttttataagaagaaagtaattgatttgggattttttatttatatttttttttttttttttttaatgtaaaattatttgattgaatttggtttttaataaagtaatttagagttatttgataatttttgtattgtaattaatattttttttttttttttttttaaattattttaggggaaagaagggagtaagatagagatttaaaaatatatatatgtatagtgttgggtttagtggtttaggtttgtaattttagtattttgggaggttgaggtgggtggattatttgagattaggagttagagattagtttggttaatatggtgaaattttgtttttattgaaaatataaagttaggtgtggtggtatatgtttgtaattttagttatttgggaggttgaggtaggagaattatttgaatttgggaggtagaggttttagtgagttgagattgtattattgtattttagtttgggtaaaaaaatgtgaatttttgttttaaaaaaaaaataagaagagatttagagatagaaagagggtttgggtttgtaattttttgtttttttgtgaagtaaattttttaatttattaaaaatatagtattaggaaatgttgtgtttttaagtgttagtgtgtttttttttgatttttgatttatgtttgtttatttgatgaagttattagtggtttgtagtttgtataggttaggagggttttaatgatttaggatatttttgttggatgttgtggttgaaattatagtatttttggtagtaaagtgaggggtgtgtgtgtgtgtgtgtgtgtgtgtgtgtgtgtgtgtgtgtaggtaggtaggaggagtaatttaaaagagagattttagtatgagggatgattattttttaaaatttattatttaggtttttgtaggtaatattttgaatttaaaatgatttttagttaagttgtgtttgtatttgggaattgtgagaagtattgaaagttttataaaggagaggaaatttgattatgataggaagtgatttatagtttttgaggtttagatgtattgatataaggtagtgaagtaggaaagaattatggtttttaaaaagaagtaggattttggttttttttttattttagtgtgatgtgtgtgttttagaataaaattttttaattatagtgtaaaagtgatatttatgtaataggagtggtttaaattttttgtttttgtgggtttgatatagaggaaagttagaattttttttatgatttgtttattgtgtgttagtgttgtggtttttaagtgttgtgtaaatttgattttttaagttttaggtgggttatgtgggtgatggtagtgtttaaaagtgtggaagaaatgagttaaagttagtaagttatttggagattgaggttgtggttgtttgatttatagtagtatatttttttgtgtgtataaattgttagatatttttattttttagtattttttgttgtttgatttttttttatgaatattttttgttgttttatttgaagtaataagggatttgatatttagtagtaggtgagtatataaaaagttgagtatgaattgtattgttggtgtgtgaattgttttggaagaattatgttattggaaaatttgatatttttttgaaaagatgatgggttttattagtgagatgtttttattttagaggaagttatttttttaatgtaatattttgtttgatatattgttttaagattaattttaggagaattttgagtgtagtaaaagtattttgtattattttttagtaagtgattttataataaataagattattgaattttattttttgagttaggttttataatattaatttttattagtgttttttatatgtagttggggtgaaatgtgtttagtttgttttttttttttagtttatttttttttgttttttttatttaaaatttagtgttagagggatagtttgaaataatttgaagggatggtatatgatgatttttgaggttgtttttttgatttttagatgtttttttgttttgtatgatttgttatttgggggtgagtgggggaagttagtggaataaatatatttttatttgtaaaattgagtattggttttgaattaatatgaagggataaatggaaagtaaggtgaaagtatatgatgtaagagagttgattaatatgaaaatattggtagaaagtgttgtaattttttaagtggtttgtataggagaaaaagttgtttatttttaggtaagattggttaaatattgtgggttaagtttaggttttatgtatatgtgg

SEQ ID NO: 4028 - DNA, 2431 bp, Artificial Sequence
  chemically treated genomic DNA (Homo sapiens)
ttatatgtatgtggggtttgaatttggtttatgatgtttagttaattttatttaaagataaatagtttttttttttgtataagttgtttaagaagttatagtattttttattagtatttttatgttgattaatttttttatattatatatttttattttgttttttatttgtttttttatgttaatttaaagttagtgtttggttttgtagatagaaatatatttattttattggttttttttgtttatttttaaatggtaggttatgtagaatagggaaatatttggggattaagggaatggttttaaaagttattatatgttatttttttaggttgttttaaattgtttttttaatattgggttttggatgaaggagatgaaaagaagtgaattgaaaggggaaaataaattgagtatattttattttagttatatgtgaagaatattggtagaaattagtattatgaggtttggtttaagaggtaaagtttaatggttttatttattatgaaattatttgttgggaaatggtgtagaatgtttttgttatatttaagatttttttgagattgattttgaagtagtatgttaggtaaggtgttgtattaaaaaaatagttttttttggagtggagatattttattggtaaggtttattatttttttaaaagaatattaaattttttagtgatatggtttttttaagatagtttatatattagtaatgtagtttatatttagttttttgtatatttatttgttgttggatattagattttttgttgttttaagtggagtaataagaaatgtttataaagaagaattaagtaataagaaatgttagagaataagaatatttgataatttgtgtatataaagaaatgtattattatgaattgggtagttataattttagtttttaagtaatttgttggttttagtttattttttttgtatttttggatgttgttattatttatatagtttatttggaatttggaaaattaggtttgtatagtatttggaaattataatattgatatatgatgaataagttatagaggaaattttgatttttttttgtattagatttataaaggtaagggatttagattatttttgttgtatgaatgttatttttgtattgtggttagaggattttgttttaggatatatatattatattgggataaaagagaaattaagattttatttttttttgaaaattgtaatttttttttattttattattttatgttaatatatttgagttttaggggttgtaagttattttttgttgtggttaggtttttttttttttatgaagtttttaatattttttatagtttttaggtgtaaatatgatttggttgaaagttattttgaatttagaatattgtttatagaggtttagatggtgggttttgagaaataattattttttatgttaaagttttttttttaagttgttttttttatttatttatatatatatatatatatatatatatatatatatatatatattttttattttgttgttagaaatgttgtggttttagttatagtatttggtgaaggtgttttgggttattggaatttttttgatttgtataggttgtaagttattgataattttattagatgggtagatatgaattaggggttaggaagggatatgttgatatttaaagatataatattttttgatgttgtgtttttggtaagttgaaaagtttattttatagaagaataagaaattgtagatttaggttttttttttgtttttaaatttttttttattttttttttgagatggagatttatatttttttgtttaggttggagtgtaatggtgtgattttggtttattgaaatttttgttttttaggtttaagtgatttttttgttttagttttttaagtagttgggattataagtatgtgttattatatttggttttgtatttttagtagagatggggttttattatgttggttagattggtttttaatttttgattttaggtgatttatttgttttagttttttaaagtgttgggattataggtttgagttattgggtttggtattatatatatatatatttttaaatttttgttttgttttttttttttttttggaatggtttaaaaaaaaaagagagaaggatattaattataatgtaggagttattaagtgattttaaattgttttattaaaaattaagtttagttaggtggttttatattgaaaagaaaaaagaaaaggtatgaatggagaattttaaattagttattttttttttataaggttagggtattgggggattggataaggttttagaatttgggaatttaattatggttttgttattgtttattttaggtaagtaggtaaattttttgggttttaggttttttatttata

SEQ ID NO: 4029 - DNA, 2460 bp, Artificial Sequence
  chemically treated genomic DNA (Homo sapiens)
tttgtaattttagttatttgagaggttgaggtaggaaaattgtttgaatttggggggtagaggttttagtaagttaagattttgttattgtattttagtttgggtgatatagtgagattttgttttaaaaaaaaaaaaaaaatggataatttttattttatttgttttaattttttataagtgttagttagatttttggaggggaaaagaaatgagtggtagaatttagttaataatttagttatttgaatttagaatggtataaggtagtggttttaagagatatttgtgtttttaggagatatttggtaatatttagaggtattttttgttgtattaataggattagggattgaggagggtgttgttattagtatttagtgggaaaagattagaaagattataaaatattttataatgtattatttaatttaaaatgttgaggtaatgataatgttgggaaattttagttttaaagatttatgttaaagtgttaatagtagtttgttttttattttttatatttgtaatttttttataatatttgtgtgttgttttattaaaaaggaaaataataaaagttatttttatttttaagataaagtggttatagtatgttagaagtttagatgtggttaaatgttggtgattgttgataaagaaaataataaatttggtttttattaatagtttttggtattttttggaattttttgtggaatgaaaatagtgattaagaggaagagagattggatttgatagagtttatttatagatatgtattattaaaaaagaaatttagtaaggtaatttgtgtttagagatttagtttagtggattttatgttggttgattttttttttgtttatttaaatggtatgaatttttagttgttgatattattgtatgggtggtgtggggtatgttagggagtatttagttttggttttataggtttattatggttggttagttttaattaaaagattttttttgttttgtttttaggatttttagatatggaattggggttttatttttggttttgggtatttatgttgttttttgttatgttgttagatttatatgtaagttaaggtagttttagaggaatatttttttttttttatttttattttttagtatagttttggatttatagttaattaagtgtattatagaagagttagtaattttgatgtgtaaaatgtttatgttttgttatttttaatatgttggtatttttgatagtttttaattagagtagtatggttaattttagtttgttatttgtgtgggttaagttgtttgaaaaatttttgagggattagttagtggtgggaggatgatttttttataaataaatgatggaattttgatgtttggaagatattagttgtggtttggtttttggggttttttgaggggatagaaatgttagttttttttttttttggttttttgggttgttttatagttgggattgatgttttttattttagtattggaagatttttaggaggtttttggattatagagatatttggttttagttttattttattattgttagtgttaaaggtgtaatatttatttttaagtgattatataaaataatttttttaagggagattttgggtatgaagtttatataaatattttagaatagttagaaaagtttattttgattttagaataatgttttataaggattgagttattaaaattattttttttataagtttattttattgggagaatatttatataaaaatttttaatattggggttgtgggagggaaagtgtgtagataatgtaaaaggattttaattttgaaagaaataaagaaaaaaagaagaggattagtatatttagttttgttttatgtgatttgaaattttatttgattttttagtagattgttattaaaattttgatattagaaagaagtttttatttatttatatataatatgatagtttatgtagaaatttgtaagaaatttataaaaaagtattagaattaatatatgagtttattaaggttatgggatataagattagtatttaaaaattaattatatgtttatatattagtaattaattattggaaattaaaattttaaaaaataatatggtttaaaaattatatagtttggatatggtagtttatatttgtaattttagtatttttagaggtaaaggtaggaagattttttgagtttaggagtttgagatttgattgggtaatatagggagattttgtttttataagaaatttaaatattagttaggtatggtggtatgtatttatagttttagttatttaggaggtagagtttaggaggttgaggttgtagtgagttgtaatggtgtttttgtattttagtttgggtgatagagtaaagttttgttttaaaaaaataaaataaaaataaaaataagatgtaattatgtata

SEQ ID NO: 4030 - DNA, 2460 bp, Artificial Sequence
  chemically treated genomic DNA (Homo sapiens)
tatatataattatattttgtttttgtttttgttttgtttttttgagataggattttgttttgttatttaggttgaagtgtagaggtattattatggtttattgtagttttagttttttgggttttgttttttgagtagttggaattataggtgtatgttattatatttggttaatgtttaaattttttatagagatagggtttttttatgttgtttagttaggttttaaatttttgggtttaagagatttttttgtttttgtttttgaaagtattaggattataggtgtgagttattatgtttagattatgtaatttttaaattgtattattttttaaaattttgatttttagtagttgattgttaatgtatagatatatgattgatttttaaatgttgattttgtattttgtgattttgataaatttatgtattaattttggtgtttttttgtagattttttgtaaatttttatatagattattatgttatatgtgaatggatagagatttttttttaatattaggattttggtaataatttattgagagattagataaaattttagattatgtaaaataaaattggatatgttggtttttttttttttttttttgttttttttggaattaaaatttttttatattatttgtatatttttttttttatgattttaatattaaggatttttgtataaatatttttttagtgaaatggatttatgggaagagtggttttggtgatttagtttttgtgaaatattattttaaaattaaaataaatttttttagttattttgaagtgtttatatgaattttatatttaggattttttttgaagaaattattttatatagttatttggggataaatgttatatttttagtattagtaatgataaaatgaaattggaattagatatttttgtggtttggaggttttttgagggttttttaatgttggaatggagagtattagttttagttgtgagatagtttagagagttaaggaagaagggagttgatatttttgtttttttaaaaggttttaggaattaaattatagttagtattttttagatattgaggttttattatttgtttataggaaaattatttttttattattggttgattttttaaggattttttaaatagtttaatttatataaatgataggttgaagttaattgtattgttttaattgaggattgttaaaaatattagtatgttgggggtggtaggatatgggtgttttgtatgttagagttgttggtttttttatgatatgtttgattggttgtggatttagaattgtattaaggaataagaataaagggagggaaatatttttttagggttgttttagtttatgtatgaatttggtaatataataggaagtagtatagatgtttagagttaaaaataaagttttagttttatgtttggaagttttgaagataagataaagggagttttttaattaggattggttagttataataaatttatggagttagaattagatgttttttggtatgttttatattatttatatagtggtgttagtagttaaaaatttatattatttgagtgaatagaaaaaaagttagttaatgtgaaatttattaggttaggtttttaggtatgggttgttttgttaagttttttttttaataatgtatgtttatgagtagattttattaaatttaattttttttttttttagttattatttttattttatggggggttttaaagagtgttaagggttgttggtaagaattaggtttattattttttttattaatagttattaatatttggttatatttgaatttttgatatgttatggttattttgttttaaaagtaaaagtagtttttattgtttttttttttagtaaagtaatatataaatattgtagaaaaattataaatatagaaaatagaagataagttgttgttaatattttggtatagatttttaaaattagggttttttaatattgttattattttaatattttgggttggatgatgtattgtagggtattttgtagtttttttggtttttttttattagatgttggtaataatattttttttaatttttaattttgttggtataataaaaaatgtttttagatattgttaaatgttttttgggggtgtaaatattttttaaaattattgttttatgttattttgaatttaggtgattgaattgttgattgaattttattatttatttttttttttttttaggagtttaattggtatttatgaggaattgaggtaaatggaataaaaattatttattttttttttttttttgagataaagttttgttatgttgtttaggttggagtgtaatggtgagattttggtttattaaaatttttgttttttggatttaagtgatttttttgttttagttttttgagtagttgggattatagg

SEQ ID NO: 4031 - DNA, 2489 bp, Artificial Sequence
  chemically treated genomic DNA (Homo sapiens)
taaatttggaatagaattttagattatagtggttaaagaaattgattttgtttgtaagtaagttggattaagatttatatgagagttttggggttaagggaaataaagtattgttttaagaaggaagattttgttttgataaaatatttttttataatgtgatttttttaagaaattataaaagagtagttagggatttatttatgtattttaatatttgaagagttttagattgattgtatgtttgatagttataggaattttatttttataagaatttatttataaaaataaaagtatatttattatttttaaatttatatatttgagttttaaaaatatagtttttttttagtttttgttagtatatgttgttaaatttttttatgttgttagatttatttaaaaattaatttttttaatgtatgttatattttatgttgttttggttgtttttgtatattttgaagaaaatagggaagataatggtttttttttttaatttaatatatatatgtgatagagaaatgtaaggatgttgtatttttagaggattaaatttaaaatgataatagatttgattgatttttttaaaaaagaattttattttatgtaatttggataataaggtatatatggttggattaaaaatattgtgtttttaagatttttttttaatttttattttataattataaagaaatgaggttatgtgttgttgtaagaagttttattgtaaatatatgtatgtgtatgtttgtgtgtgatttgtaaatttagttttagaaaggtgtaataataaaatggaattgaatttagttatggtttttatgagtgtgagtaaagtatgtatgtggaaatttaagatgttaatgaaattagtatagattttaatggtattttggtgtttttaaaagattgttattaaataaagtttaatgtgttaaaatggaaattttaagtaagagaaatgtgggaagaagtttaaggaatagaaattgtttggggaagatgatttgaatgttttttaaaatttttgagaagtattaagtttaagtttagttttttatttttgataaatattatattgtgtatttgtttgttattttgtggttttgttgtttttgttagtttgttaaatggaattttggttttagttagatgaaaatgtggtaatttttgtgttttgtttgttttggtgtttgaggagtggttgtgtttgattgtgtgaggttgtttagtgttaagggtaattattggtatttgtattgatagtaagtagtttgtagtaatagattgaaaatgttttttttagatttttagattggaattttagttttatttttaaaagttttatgtttatagtatggttgataaaataaattattaaattaattgttttgggagtttttaagttgtgatattaaggtagttgtgagttattatttttgatgaaggagtagttttagaaattgtgtgtatttgatggaggtttggtaaagtgtgtaagtttgtagatttatggtaaataggttttatttttaagtatttatttttagaaagggaaaaaaagagttgtttatttttaattttggatttattttaaattatttatagggaaatgggtgttttatttaatggtattgtttatttttatagagaaatgtttgtagtgaaaatgtaaaatattattttttttttttgttgaggttttttattttatggtgtttattttatttttttagtagagaatgtagaaaagtattaaaggtagtattatgaaatgtagagttgttaatttttaattttgttagagttttgtttttttttttatttggggagttgaattgagttattagaattttttttttatattttttttagaatataagttttgataaaattaaagggttttatatttttaaagttttagaaattttatagggtatggtgagggtaggggtggggttgaagggatgggaaatttataggttaaaaataaaaatttgggtgaaaaatttaggttttgttagttattattagtgggattttagttagttatttagatatttggttttttgtttatttgtttgtgaaatagaaatgattatatttgttttatgtgtttgttggaaatatataaaataagataattttaggagtaaagtgatttatatttgtaatgttgaaatggataaaaaataaaatagatatgtgagtgtatagatgataaatatgttataaaataaaggtagtaaagtgttagtaattgtaaggagagatgtgggtgtatgtatgtttgttatataatttttttaatttttttgtgtatttgaaagtattttaattaggaggaagtgatttagaagggtaaattttttttatgtaagtataatttttgtattttttgtttttagttaaattttagatgtaggtatatggttatattgaattttagtggagaatggaaaaaaatatattttttttat

SEQ ID NO: 4032 - DNA, 2489 bp, Artificial Sequence
  chemically treated genomic DNA (Homo sapiens)
atgaaaaagatatatttttttttattttttgttgaggtttagtatggttgtgtgtttatatttggaatttaattagaggtagggaatatgggaattatatttatatggaaaagatttgtttttttaaattgtttttttttgattaagatgtttttaaatgtatagaaaagttgagagaattatataataaatatgtatatatttatatttttttttataattgttaatattttgttgtttttgttttatgatatatttattatttatgtatttatatatttattttattttttatttattttaatattgtagatataaattattttgtttttgaagttattttgttttatatgtttttaataagtatatgaggtagatatgattatttttattttataaataagtaagtagagggttagatgtttaagtaattagttgaggttttattgatagtaattggtagagtttggattttttgtttaagtttttgtttttaatttatgaattttttatttttttaattttatttttatttttattgtattttgtagaatttttgaggttttaggggtataaagttttttaattttgttaggatttgtattttagagggagtgtaaaaggaaagttttaatggtttagtttagttttttaaatgggaaggagggtagaattttgatggagttgggaattaatagttttgtgttttatgatgttgtttttggtgtttttttgtattttttgttgggagagtaaagtgggtattataggatgaggagttttagtagagaaaagaaatggtattttgtatttttattgtaaatatttttttgtgagaataaataatgttattaaatggggtatttatttttttgtgagtaatttaaaataagtttgaaattgagaatggatagttttttttttttttttttgaaaataaatgtttagaaatgagatttgtttattataggtttgtagatttatatattttgttaaatttttattagatgtatataatttttgaagttgtttttttattaagaatgatgatttgtagttattttaatgttatagtttggaagtttttaaagtaattggtttagtaatttattttgttaattgtgttgtggatatgaaatttttaaaagtaaagttgaagttttaatttaaagatttgaaaagaatatttttaatttgttgttgtagattgtttgttgttagtgtaggtgttagtagttatttttggtattgggtggttttatatagttgggtatagttgttttttggatgttgaggtaagtaaagtatagagattattatatttttatttgattgaaattagagttttatttaataagttgataggagtaataggattatgaaataataagtagatatatagtgtggtatttgttaaagataaagggttgagtttgagtttaatgttttttgaaggttttggaagatatttaaattattttttttaaatagtttttgttttttgaatttttttttatattttttttatttggggtttttattttgatatattaagttttatttggtggtgattttttgaagatattagaatgttattaaagtttatgttgattttattaatattttaggtttttatatgtatattttatttatgtttgtaagagttatggttaaatttaattttattttattgttatatttttttagagttaaatttataaattatatataaatatgtatatgtatgtgtttgtaataagattttttgtaataatatatagttttatttttttatggttataaagtaagaattagaaagagattttaaaaatataatatttttaatttaattatgtgtgttttattgtttagattatataaagtaggatttttttttaaaaaaattagttgaatttattgttattttaggtttgattttttgggagtgtaatatttttatatttttttgttgtatgtatatgttaaattggaaaaggaaattattattttttttgttttttttagaatgtataaaagtagttaaaataatatgaaatatggtatgtattagaagaattaatttttggatgagtttggtagtatgaaggagtttgatagtatatgttagtaaaagttaaagagaagttatatttttaaaatttagatatatagatttagagatagtagatatatttttatttttatagataaatttttataaaaataaaatttttatagttgttaaatatgtagttagtttgaaattttttaaatattaaaatgtatggatggatttttaattgtttttttatggttttttaggagaattatattgtaagagaatgttttgttaaggtaaagtttttttttttgggataatgttttattttttttagttttaaagtttttatatagattttgatttaatttgtttataagtaaagttagtttttttggttattatgatttagagttttattttaagtttg

SEQ ID NO: 4033 - DNA, 2500 bp, Artificial Sequence
  chemically treated genomic DNA (Homo sapiens)
tagtgatattatttgggtggtaaggttattgatgaggtaaatgttattttattttttgagttataatttttaaattttttgtaataaatatttattatttttataataagaaaaataaataaattttattagaaaaaaattttaaaatataatgtaaggttgtaattttttttttttagattttattgtattaagtatgtataaaaggtttaagaaataatttttggtttttttaaattttgtgtggaaaggatgtgtgtaaatgtataggtgtttttgattgtatttgtgattatggaaagatgttattatattgagtggtttttttaggttgtgtttattttatttgagaagtgattttaggaagtattaatttgagagtagggaaatgagatagatagtggaagaaagttattattgggtaaatggggttttattttattgggatttttgagagaaagagggatatattgtagtgttattttttttgaggagtaaggaagttgggggtatttttttgttgtttttatttgttattggtttaaggatgattttagagtatgttaattatttggtatttttagtttttatgtttaggttgagtatgttttagggatttgagaaattttttatttttttaaaattatatagtatttgttattggaaggtattgggttgatatatggaagtgtgatgagtgttgaggggatatgggttaggtattaataaaatttattgttatagtattttgttttttttgttaagtattattttagtaattttattgatgattttgttttggtggggttgggattgtggtgggaagggagtaggaatggtagggatgtagtaggtttataagggaaattttgtgattgggtttggtgttattttgttttttgttaaatgtttgagtgtttatttaaaaggttgattttgtttgatgattttgggaatatttaaaataaaagatgtgaaatttaggttttaatattaatttagtatggttagaggaattgaagaatgtattatgaaaatatgatattagaatttagagatgtttatttatgagtttggtaaggttttaaaaatttttttatgatgtgtttgagtttttttgtatataaggtaaaattttattaatttggttagtttataaaattttttataaattgttttatgatgtgtttgaaatattttaggttgagttatttgttgataatttgttttttatttttgatattttggttgaggattattttttttaaaatagaattgttaattttttggagatttgtgattattgtgtgttagtaatgttagtttattaggtatataaatatttatttattggtgttaagtaggtagtaatagaattttggattttagttgttggagaagaaataaagatttttagaattagaattataaattgtttattttatggttgaggaaattgaggttgaaggttatttagttaatttgatgtggagttggaatgaaattttattattttgttttatgaagttgtttttgtataaggttgattggtggtttattttggttggttgatgaaggatattggttttataatttagtgatttgttttaagtgttagattagtttttttatagtgggatttgatattttttttgtattggttattgagtggttggtagtaattttattttttatggtttttttgggttttttagttttttagattttaaattggttaggattgtgtattttagaaaatattgattgattatttaagaatattgttaattagttagaatgaattgttatgggattttaatataatattttggagtgttagatatagagagaagatatagttgggagttggtatatttaagttttttggtttggttttttttttattttggtggaggtaattttgaagataaataaattatgtgagtaaattattttatggtgaggttaagtttattagagattaaatgtttagaggggaaaagggaagttgatttttttgatgatttaaaaagaatgttagttgaagttaaagtataatattttagggttatttgttggttggtggaggaaggtatggtttttttatagggtaaggatagataagataggtagataattatagtttgtgtttgggtagtgtatgtgtaaatagggtggagaatttgtaggttattaagttaaggaaataatttttttttgttgttatgtatttattagtaaaattggaataatttttatttttttttattgtttggaaagattaattaggataaaatagaaaaagtatatagagaattattaagaatgtagtgtgtgttgagtagatattatttatgtatttgttatttatttttttatttatttatttatttatttatttatttattttattatttatttatatattttatttttatttatttatatttatttatttatttatttatttatttatttatttatttattatttattattt

SEQ ID NO: 4034 - DNA, 2500 bp, Artificial Sequence
  chemically treated genomic DNA (Homo sapiens)
agatgatagatgatagatagatagatagatagatagatagatagatagatagatatagatagatgaagatgggatgtatagatagatgataggatggatagatagataaatgggtggatagataaagagatagatgatagatatatagataatatttatttagtatatattatatttttggtagttttttatgtgttttttttgttttattttaattaatttttttaagtaataaaaagaaatgaaaattattttaattttattaataaatgtatggtagtagagagaagttatttttttggtttaataatttataagttttttgttttgtttgtatatgtattgtttaagtataagttgtaattatttgtttgttttgtttgtttttgttttgtgggaaagttatgtttttttttattagttagtgggtagttttagaatgttgtattttgattttagttgatgttttttttgaattattaaagaggttaatttttttttttttttttgagtatttaatttttaatgaatttaattttattatagggtggtttgtttatataatttatttatttttagaattgtttttattaggatgggaagaggattaggttagagaatttaagtgtgttagtttttagttatgttttttttttgtatttgatattttaaaatattatattaggattttataataatttgttttagttgattagtaatatttttaggtaattggttagtgttttttgaagtatatagttttgattaatttagaatttaaggaattaaaaggtttagaaaagttataaagggtgaaattattgttaattatttagtggttaatatgaggagagtattaaattttattatggggagattgatttggtatttagaatgaattgttgaattatagaattagtgttttttattagttaattagaatgggttgttaattaattttgtgtagaggtggttttatgggatgagatggtggagttttattttagttttatattaagttggttgggtgatttttggttttaatttttttaattataaaataaataatttgtgattttagttttaaaagtttttgttttttttttagtaattaaggtttagaattttgttgttatttgtttaatattaataaatgaatatttatgtgtttggtagattgatattgttagtatatagtggttataggtttttaagaagttagtaattttattttggggaagataatttttagttgaggtgttaaaaataaaggataaattgttaataaataatttagtttgaggtattttaaatatattataaaatgatttgtgagggattttataggttggttgggttgatggaattttgttttgtatgtagaagaatttaaatgtattataaaaaaatttttaaaattttgttaaatttataaataaatatttttgagttttgatattatgtttttatggtatattttttaatttttttggttatattgggttaatgttgaaatttggattttatattttttgttttgaatatttttagagttattaagtagggttagttttttaaatgaatatttaagtatttgataggagataggataatattaagtttagttataggattttttttatggatttattatatttttattatttttgttttttttttgttatagttttagttttattaggatagaattattagtaagattgttgaggtggtgtttaataagaaaagtagaatgttatggtagtggattttgttggtatttggtttatatttttttaatatttattatgtttttgtgtgttaatttggtgttttttaatggtaagtgttgtgtggttttgggaaggtaaagagttttttaggtttttggagtgtgtttggtttgggtatggaggttggaagtgttaaatagttgatatgttttgggattatttttaaattaatagtagatgggagtggtggagaaatatttttagtttttttgttttttagggagaataatgttgtagtgtgttttttttttttttagaggttttagtaagatgaagttttatttgtttagtagtggtttttttttattgtttgttttatttttttgtttttagattggtgttttttgggattattttttaaataaagtgagtataatttaagaaagttatttaatgtaatgatgtttttttatggttataaatgtagttagagatatttgtgtatttatatatattttttttatataggatttaagggagttaaaaattattttttgagttttttatatatgtttagtgtagtgggatttaaaaaaaggaaattatagttttgtattatattttagggtttttttttagtaaaatttatttattttttttgttgtaaaagtgatagatgtttattgtagaaaatttagaagttatagtttaaaaaataggataatatttattttattaataattttgttatttaggtggtattattg

SEQ ID NO: 4035 - DNA, 2460 bp, Artificial Sequence
  chemically treated genomic DNA (Homo sapiens)
agtattttatataaaagtatttagaggttttttatttgttttgagtatgttttagatgtataaatattatttattttaaattttaaattaaaaggtgtattgtaattgttttaaataaaatattagttaagattgaaatatatataaatttaaagtaatattttttttttttatttatgtgaagggagtttagttaataaattttaggatatatgttggaggaattgtttagtaatatattttaagtaagtaagtatttaataaaggaatttatttttagttttttaaagataaatattataaatttattttatagttaagttgtgaagttagttttttgttgtagatttttttaaatgtttgtttgaataagatggggggtaaaattgattttgaagaagtgaagtttattagtgaaatgtatttagggtgtttatttgggggggtattttgaaaaaatgaagaaaaatatttagttataggtttagttttatataaatttgtttgtagtatgagggttatgaaggttgatgagtggaattttagttttgggagaaaatttttttttgtgagtatttaaattaatatattagaaattatagtatattttagagaatatggtagaaattgtgaaaaatagagtaagatttttttttgtttttaataataataataataagttttaaggattatattaataaagtagattgatttgtttaggaataaaatttttaaataattttgtgaaagataagtattttttattgtagtaaaaataatgagtatgattttttttttttgatgaagattttgtttaatgttttaaaaatattttgtagtgatttttatttttattttttttttttttagttttttttttgaatatggaattagagtgttttttgttgtgaagtatttttgggaaagaggtgttaattttgtattgtttttgagtgtaatatatattttttattttaaatgggagtttataatgatattgtgtggaagggattttaggtttttgtgattattattatgtttttttgagttgtgtttttggaaaaaaatgtgaaggaggtagttttttggaatgaataaattttgttgtttgtttgtaattatttattaaaatagattaaagaaataggttaaaaaggaatttgttatttatgttagagatagtataataagagtatatagaaagggaaaattaatattagggaggaaggaatgttagatatgtgtttttaagaatatggttatgtttgtattgttggtttatatgtagatatatgtttgggttttttatttggtagggtgggttgtgttgatgaaaatgtgggttattaatattgatgtgtatgtttttaattaatattagaattgagtggtaaatataattaggagagtatttaagagagaaatgggttaaaagagaagttaatgtgtagagaggagggggaagagatgggttggagagaagaaattggttagtttttgtttagatgggtttaatttagttatttgagttaaaattggaaatttgttttttagtataattgtttttgtgtttagtgggtgttgtttttgtaggtgttttttattgtaggtgaattttataaatagtatattattattaaattattttgggggttaattttttttatttgtgtttttagtttttatgtaagtatttttatagtgttttttaatatataggatttatttttggttttgagaagagtttttaaatttaattttttattggagtattaatttgtttttttatttttaaattagtatttttggttaatttttattagaaatggtagatttttttagtatggttatttgagaaatataggtttgtgttaattttttgttttgttttgtggttgtttttgtttgtgattgttgggagaataatagggtgggggagattttgatgatggttgttgatattatttttgtatttttgttttttaaagtttaaagtatataattggaaatatttgtggatggttgttttaaaaatatttttaattatatttgtttaaagaaaataaaaattattatttatttttaaaaaaaggaatgttagaatttatttttgtttttttattttggttttttttatgatatttgagtggaataatatgttatgatgtttatgtatgaaaaatagaatatatttgtatatgttatgaggaagaaagttgtttttaggaaaatgaattttttttttttttttttatgttttaggaaatgatttattaaagtaataaaataatttattgggaaagtagtgttatttataaaaataattagtttttgatttttttttatttttataaggttaatgtaataaggatgttgtagaggtaaaaatgaatttgaatttttttaattatatgaatatttatgaattttattgtagtttttatgtaattattttattta

SEQ ID NO: 4036 - DNA, 2460 bp, Artificial Sequence
  chemically treated genomic DNA (Homo sapiens)
taaataaagtggttatataggagttgtaataaaatttataagtgtttatatggttaaaaggatttgagtttatttttgtttttgtaatatttttgttatattagttttataaaaatgaaaggaagttaaaggttgattgtttttataaataatattgtttttttaatgagttattttgttattttgataaattattttttaaaatataaaaaaagaaaaaaaaagtttgtttttttagaagtagtttttttttttataatatatgtaagtgtattttgttttttatatataaatattatagtatattattttatttaaatattatgggaaaagttagaataaaaaagtaaaaataagttttggtatttttttttttaaaaataggtagtagtttttattttttttaggtgaatatgattagaaatatttttaaggtaattgtttataggtatttttagttatgtattttgaattttaagaaatagaaatataagaataatattagtgattattattaaaattttttttattttgttgtttttttagtagttataaataaaaatagttataaaataaaataaaaaattaatataaatttatgttttttgagtggttatattaaagaaatttattgtttttgatgaaagttaattgaaagtattggtttaaggatgaagaaataaattagtattttagtgagggattaagtttaaaagttttttttagaattgaagataaattttgtatattagaagatattataaaagtatttgtgtaagagttaaaggtataagtggaaaaagttgatttttaagatggtttgatgatggtgtgttgtttataaaatttatttgtaatgaaaggtgtttgtaaggatagtatttattaaatatagaagtaattgtattagaaaataggtttttagttttgatttaagtgattaaattaaatttatttgaataagggttgattgattttttttttttaatttgtttttttttttttttttttatatattggttttttttttagtttattttttttttgaatgtttttttagttatgtttattatttaattttaatgttaattagagatatatatattagtattagtaatttatgtttttattagtatagtttattttgttaaatgaaaaatttgagtgtgtgtttgtgtgtaagttaataatgtagatatggttgtatttttgaaagtatatatttaatatttttttttttttggtgttaattttttttttttatgtatttttattatgttatttttaatatgggtggtgggtttttttttagtttatttttttaatttattttaataaataattataggtaggtggtaggatttatttattttagagggttattttttttatatttttttttagaggtgtagtttaaggagatatggtgataattatagaggtttggaattttttttatataatgttattatgagtttttatttaaaatgaaaaatgtatattatatttaaaagtgatataaggttagtgttttttttttaggaatgttttataataagggatattttggttttatatttaggaaaggagttggaggaagaaggaatgaaaataaaaattattataaaatatttttaagatattaaataggatttttattgggaaaaaaagattatatttattgtttttgttataatagggaatatttattttttatagggttgtttgagaattttatttttaaatggattaatttattttgttagtatggtttttggggtttattattattattattaaaagtaaaaagagattttattttgttttttataatttttgttatgttttttaggatgtattataatttttaatatattgatttaaatgtttatagaaaagggtttttttttagggttgaagttttatttattagtttttatgatttttatattataaataggtttgtatagagttgagtttgtagttgaatgtttttttttatttttttaaaatgtttttttagatgagtattttgggtatattttattgatgagttttatttttttaaaattaattttattttttattttatttaagtaaatatttaagagagtttgtaatagaaaattaattttgtagtttagttgtagagtgggtttgtaatatttatttttggaggattgggaatgaatttttttattaagtgtttgtttgtttgaagtgtgttgttaaatagtttttttgatgtgtattttaaaatttgttaattgagttttttttatataaatggaaaaaaaaagtattgttttgaatttatatatattttagttttgattaatgttttatttaaaatagttatagtgtattttttgatttgaagtttaaagtaaataatatttgtatatttgaaatatatttaagataaatgaaaagtttttagatgtttttgtgtgagatgtt

SEQ ID NO: 4037 - DNA, 2463 bp, Artificial Sequence
  chemically treated genomic DNA (Homo sapiens)
ttatgaagtgggtggggaggaaagatagatttaaaaatttattagtatttaattttgttaagattttttttattatatgttagtataataatttatttgaaatgtgtattaattatttttgttgtattttgtgtgtatgttttttatgtagtttttgatttttttgttaataattttgtgttgtatttgttgatttgaaataaattgaatttagtggtatttatttaagaattgaattatatagtttttttaattggtgttttatttaaatgtgagaaagtaatggtttgttatttgtaatatgtttttaataaaataaaattagaattttaatatttttttttattttagggaaaggtttggttatgaaaatattatttttgtatgattttaaaaataaaattttttgaattttttttattgttaatgttgtgaaaattgtttatatagatatatattaattggagagatttatgtaaattagttgggttaggaaggttttttttggaagtggtttttaaaataggtggtaatttgtttttgttgttaatagttatattgtttttttttttttagtttttggattttggattatgtgatttaatatatttttggttggtaaaataggaagtgttaagataggaatatgttaagtatttgaagatattttttattgtatttgttagttttaagtttttgagttgtattgtttgttggttggagggggtagaaatttaattttaggagtttagtgatgtttttttattgatggttttataggtaatagatattgtgggtaatattgtttttaatattgtttatttatgtttttttttggaggatttttgtaagtgattgaatagataggagtagttggaaattttgggttttgttttttaattttagtgtgaaattaattgttttaattgtaaagaatgatttatttttttatttattatatttaatttaaaaatgtaaatgttattagtggattgattattgataagggtgtttttgtgtttggttttaatttttattagtgaggattatgaggatgtagttatattggtattttttaagtgttattgtgatagtatttgttgtataaatgtttagttgttattgtgagttttattatttagtttttttttttgaatgtagattaataagtttagaaattataattgtttttttgttgaatttgtgataggtggaaataatgatattagtgttttgttaatttttttgtttttgtgtttggtattgttttattgagttatttgttatattttgttttgatgaggtgaatttaatttttttgttgtaatgataatggggttattttaatgtttggaaatgattatgtggaagttttattgtgttttgttttggtaagtaaattaaggtattgtgtatgttaggagagtgggttttggttgttaggtaggtagtggagatgttgagttattattaggatttagatgtagaagttggttttattttgagtttttggtggtggttttgtaggagggaagaaggatggggaggggaaaggtgggattattgttgtagaagtatagttattggttaattttttagttgtttgtataaatttgtttttagaagggttttttaggttatttgtgttgtttaaggaggttagggtggttggagtttataaataattgtggtgatattattaatattatttgttggggtttttggtgtgtggattgtggattttttttttaggatattaattgaattaaattatttttatattaggtttgattttttttggttttttgagaataatattgttgtagaataaaaaaatatatataatttggaaaatattaggtgttaatgaggatttggagtaattagattttattattgatgttgatttttaaaattattttagaaaagtagtagtttttattgaagttagatatatataaatttagtaaattttgtattgatatagaatattttatatatttataaagtgtatgtgagtatttgttatatgtatagaatgttaaaattagtaattttgtttttaggtagataattaatagagatgtaagtgtgtatttgataaaatatatgaattagaatgtttatagtagtattttttatgataatgttaaattgtaatttgtttaaatgtttattaatagtagaatgttttaggagttggtttttggtggaatattatatagttattggaatgaatgaattataattgtgtggatggattttataaataggatgttggatgaaagaaattaagtatgatagagtatatatgtaaagaattttaggttgggtatgttgatttatgattgtaattttagtattttgggaggttgaggtaggtagattgtttgaggttgggagtttaagattagtttgattaatatgaagaaattttgtgtttattaaaaatataatatatta

SEQ ID NO: 4038 - DNA, 2463 bp, Artificial Sequence
  chemically treated genomic DNA (Homo sapiens)
taatatattgtatttttagtagatatagggtttttttatgttggttaggttggttttgaatttttgattttaggtaatttgtttgttttagttttttgaagtgttgggattatagttatgagttaatgtgtttaatttggaattttttatatatgtattttattatgtttggttttttttatttaatattttgtttatgagatttatttatatagttgtagtttatttattttgatgattgtatggtattttattaaaaattaatttttaaggtattttattgttgatgggtatttggatgaattatagtttggtattattatgaaggatgttgttatgaatattttagtttatgtgttttgttaaatatatatttgtatttttgttggttatttatttaggaataaaattgttggttttgatattttatgtatgtaataaatatttatatgtattttataaatatgtaaaatattttgtattaatataaaatttgttgggtttatatatgtttggttttagtagagattgttgtttttttgaggtggttttagaaattagtattagtagtgggatttggttgttttagatttttattgatatttagtgttttttaagttatgtgtatttttttgttttgtagtagtgttatttttaaagaattaggaaagattaggtttggtgtaagagtaatttgatttagttaatgttttgaagaggaaatttataatttatatattaaaagttttagtaaatgatgttggtagtgttattatgattgtttataagttttagttattttggtttttttgaataatataggtggtttgggaaatttttttagaggtaaatttgtgtagataattaagagattagttaatggttatgtttttgtagtagtgattttattttttttttttttatttttttttttttttgtaaggttattattaaaggtttaaaatgaagttgatttttatgtttaaattttaataataatttagtatttttattgtttgtttgatagttagagtttgtttttttggtgtgtatagtgttttggtttgtttgttaagatagagtatggtgaagtttttatataattatttttaaatattaaaatggttttattgttattatagtagggagattgaatttgttttattaaagtggagtgtgataggtgatttaataggatagtgttaagtgtagaggtaagaagattagtagggtattgatattattatttttgtttattatagatttggtagggaggtaattgtaatttttgggtttattagtttatatttggagggaaaaattgagtgataaaatttatggtgatagttaggtatttgtgtagtaagtgttgttatggtgatatttagaaaatgttaatgtggttatgtttttataatttttattaatagaggttaaagttgggtataaaggtatttttattagtgattagtttattaataatatttgtatttttaagttaaatatagtaagtaaaggagtaagttgttttttgtagttgggataattaattttatattggaattagagagtaaagtttaaaatttttagttgtttttatttgtttgattgtttgtaagaattttttgaggaaagatatgagtgaatggtgttaagaataatgttatttgtagtatttattgtttgtgaagttgttaataggagaatattattaaatttttgaaattagatttttgttttttttaattaatagataatgtggtttaaggatttaaaattaataaatgtagtggaaaatatttttagatgtttaatatatttttgttttaatgttttttattttgttagttggaggtatattaaattatataatttgaaatttaagagttggggagggaaaggtagtataattgttggtaatggagatagattgttgtttattttaagggttatttttaggaaaagtttttttagtttagttgatttgtataaatttttttaattaatatgtgtttatataggtagtttttatggtattggtaatgaaaaaaatttagagaattttatttttgagattatataagaatgatatttttatggttaaatttttttttagaatggggaaaaatattagaattttaattttattttgttggaaatgtattataggtggtaagttgttatttttttatatttaaataagatattaattaagaagattatgtaatttaatttttgagtgagtgttattgaatttaatttgttttaggttaatgaatgtaatgtaaagttattaatgaaaaggttaggggttgtgtagaaagtgtatatataggatataataggggtaattagtatatattttaaatgggttgttgtgttggtatatggtggagaaaattttaataggattagatgttaataaatttttaagtttgttttttttttttatttattttatga

SEQ ID NO: 4039 - DNA, 2499 bp, Artificial Sequence
  chemically treated genomic DNA (Homo sapiens)
gttgtagattgagattttttgtttatttggagggtgaatttggggtgttgaagggtattggggtgtttagggttttttatgtttttttttagtgttatttttgggattttattttgttagagtttttgatattttatgagaaagttggaaatttaggttttttttttttttaattagaaatgttaggatttaaaaatataagtagttaattaaaaatttaaaaatttttaattattgtgtaagttaaatgaaataggtataataaatatgagttgttatgtttttaggtgtttggttagttgggatataggtgaggggttgatggtaggtgtaggtgatttttttgtttattgtttgtttattttatgtgttgttgtttggatttattaatattgtttgttttatatttttgtttgaagaaagttttgttatgtgggtgagttttgtttatattgagagtagggttgagttgtagttagttataaagtttatttttagtgggatattataagggtttatatgaattgaattaataatatttttatatttgaggttatataattttaaaggaaatgtgatttttatagagagaatgaagatgtttttagtatttttaaatatattgagtgttttttaataagtgtattttttttattttgtgtattttgtgtatgaaagttttttgtgaggttatgtttatgaaaataaatgttttttttttttttttttataaaagtggaataatgaaagataaggttaaggttatattatggttatagtggttgttaataagttttttgagattgtttttttttgttgaaattagttaatgaattggagttttttattgagtttatagaaggtagttttttagatttgggagtagataattagagagatattttttttatgtagtatgttgaagggtattatttggttttgtggttatattagttgagtttggtttaggattaattttgttaattattataggtggatttttggtttaaggaagtaaataaggttttggggtatttttttatggttgttttgggattttttagaagtgataagttgttaatttggaagttgtttgggtgataatgatttttgaatgggtttttatgtggatgagtaatatgatttaaggtattagggatattagaaaggatattttttatgtagtttgaaatgtgagtagagagtaaaatagattttaaaagatgagtattgttgtttttttgatattataaagtgttttttgagtgataatagtgtatttttgtgtatgaattgtatttaagttttgtatttttggaaaataataatttgtgttttttggttattatagatttagtatgggtttagaggttttatgtgtgtaggattttatttgtgtaatttttttagtgattgggagaggtaggagtggtttttgtttttattttataggggaggagatggagatttttaagttagtgaaggatttagttgggattttttagttgaagtttgtggattttaaagtttgtgtttgttgaggattaagagatgatagaatttgtagtggtttggatgtggtaggaatttattttatttatttttttttaagatatgggtggtgggagttgttaggttgatagagtatttgatgggaagttaaaagaaatttagtttggttagtagtgtgtttggaattattttgtagggtttattttaaattatggggattgttgtagatttattatttatgtaaaaaaaaaaagttttttagtgatgttatgggagggttattgtggattattgtttgattaattatggttgagtagggagagttgttgttattttttttttttttttgtttttgtgaagttttttatttttttattttagttagatgtttttattaattttatttttttttagttttttgggaaatttattatatttgttttttttttatttttgaatagtttttttttgttaattggattttttttatttttttttttattaatgttgtaaaagttgaaagaattgtatagagaaaattatgtatttattatttagatgttataattggtatttgttgtatgtgttggattatatatttggttttttgtttatttttttaattgtttattaagattttaaaaaaatgtattttaaagtaggttgtagatattatatatttgttttttatatattttagtttgtatattattgattagattttaagatttatttttgttgttttttttgttaagtaaaaatttatagtgaaatgtataatttttatatgtagtattgggtaagttttttttattagtttttaatatatttgttaattttttttattaaaaaattaagttaaatttgtttttattttaggtttatttagttattgttttgaattgtttttttttatttttaattagattttttgaaagtattgtatttgttttttttttttagtttttttttgtatttatttggttt

SEQ ID NO: 4040 - DNA, 2499 bp, Artificial Sequence
  chemically treated genomic DNA (Homo sapiens)
gggttagatgggtgtagggagaggttggagagaagaaatgggtgtagtgtttttgaaaagtttgattggaaatgaggaggagtaatttggggtagtagttgaatgggtttgaggtgagggtagatttggtttggttttttaataggagagattagtagatgtattaaaagttaatggggaaaatttgtttaatgttatatgtgagaattatgtattttattgtaaatttttatttaatagaaaaagtaataaaaatgaattttgaaatttggttagtggtatgtaggttgaagtgtgtaggaagtgagtatataatgtttgtaatttgttttgaaatgtatttttttaaagttttggtgggtggttagaagaatggatagaagattagatgtgtgatttagtatatatagtaaatgttagttgtggtatttgggtggtaagtgtgtgattttttttgtataatttttttaatttttgtaatattggtgaaaaagaaaataagaagagtttagttgatagaaaaagattatttaaaagtaaaaagaaaatagatgtggtaagttttttaaggagttgggaggagatggggttgatgaagatatttggttgagataggaaggtgaggaattttatagaaataagagaaaaaggaaaatgatagtaattttttttatttagttgtgattaattaagtagtaatttataatggtttttttatggtattattgagaggttttttttttttatatagataatgaatttgtaataatttttatgatttaaggtaaattttataaggtgattttaaatatattattaattaggttaaattttttttaattttttgttagatgttttattagtttgatgatttttattatttatgttttgagaaaagataagtgaaatgagtttttgttatatttaagttattgtaagttttattattttttgatttttaataagtataagttttgggatttatagattttagttagagagttttagttggattttttattagtttagggatttttgtttttttttttgtaaaatgggggtaagaattatttttgttttttttaattattgaaagggttatatgaatgaggttttgtatatataaaatttttaggtttatattgggtttatagtaattagaaaatatagattgttattttttaaaaatataaagtttaagtgtaatttatgtataaggatgtattgttgttatttagaagatattttataatgttgagagagtggtggtgtttgttttttgaaatttgttttgttttttatttatattttaagttgtataaaaagtgttttttttggtatttttggtgttttaggttatgttgtttgtttatataaaagtttatttgagaattattattatttaagtagtttttagattggtggtttattatttttgaagggttttaaggtggttatggagaagtgttttaaagttttgtttgtttttttgggttaaaggtttatttgtggtaattagtgagattggttttggattagatttagttggtgtagttataagattaaatgatgttttttaatatgttgtatggaaaaagtgtttttttgattatttgtttttagatttgaaaagttattttttgtgagtttagtggaaaattttaatttattaattgattttaatagaaaaagataattttaaaaggtttgttgataattattgtagttatggtgtaattttaattttattttttattattttgtttttatgaggaaaagaaaaaaaggtgtttgtttttatggatataattttatagaaagtttttatatataagatgtataagatgaaaaaaatatatttattggagaatgtttgatatatttgaaagtgttaggaatatttttattttttttgtagaagttatattttttttaggattgtgtagttttagatataaaaatgttgttaatttaatttatgtgaatttttataatattttattgaaggtagattttataattgattgtagtttaattttgtttttaatatagataagatttatttatgtagtagaattttttttaaatagaaatatgaggtagataatgttaatgggtttaagtaataatatatggaatggataggtagtgggtaagggggttatttgtatttgttgttagttttttatttgtattttagttgattaggtatttaggaatatagtagtttatgtttattatgtttattttatttggtttgtataatggttagggatttttgaatttttagttagttgtttatatttttaaattttgatatttttgattaaaaaaaaaaaaaatttggatttttagtttttttatgaaatattaggaattttgataaaatggagttttagaggtagtattaagggaagatataggaagttttagatattttagtgttttttagtattttaaatttattttttaaataaatagaaaattttagtttgtaat

SEQ ID NO: 4041 - DNA, 2323 bp, Artificial Sequence
  chemically treated genomic DNA (Homo sapiens)
tgagaatttatgttttttaaaggttttaggtgattttgtataaggggtttttgttatattagttggatgttttgaggttttttggagtagaatgaggtgttaaggtgttgtgtttaaatgtatggtttggttaagtgttttagtgtagtgatttttagagggttagatgtagtgaaagtgaaaatgagtatgtgggttatttagatattttaagtttattattttgtttgggttagggtgtatgatgtttatttttgtaaaatagagtgagtaggtagggttgttttttttttttgtagttgggaagttttagttagtttgttttattgaatttttagtttttggagttggtttatttttttttagagaaaatagttttattataaatatataaatttgagttggggtgggggttataggtttttgtttaagtttattttgtaaaattgatttttttgttaatgagaatatagttttgtttttattttttttgtgtgttttggtagtttttgtttggttgtaaaatttatttaaggaaaattggtatttattttgggtttatttgtatttagtaaaattgataaatagatgggggttggttaggttatgggtaatttggttagtattttataaaatataaatgttattttttatttttatagggattatttattgtgaattaggaagttattggtttgttatattttaataggattatttattttagttaagggatttatgtttttattataaagtggtggggggtgttttgggtggaagagattttttggtattgttggtaataaaggaataaaatggttttgttgggtttgtgtatgtatatatagggtatttatttgtgaagattgtgaaaaaagaaagaagtaaagaaagaaattaataagatttgatggggaagtttgtaaaggagattagaatttagattaaatgttttattttagtgtttttggagtttttttttttttgtgttttagttaaaggtattgggaggattagagattttattttagttttgtttattttgggaataattgttggtgtatgaataataatgtttttttttgattatgattaattgaattgtagtttgtgggtagtggggaggggttttgttgggttagtttattatggtgttttttaagtagttattgatagtgatggatgtagtggtgttttttagagtgtatttttgaatatttaagagtaggggtatgaatttgtattttgagtttttattagttggggtttggtagagaggatgggaatggtggtagttaaagatgagttggttgattaaaaggaagaggagaggtagttttttttttaattttttttttttatatttgattttaagtaagttttgtttatggggataaatgagaaaatatttattgtgtgattatgtaggttttagtggggttatttttgttgaggttgtgtttgttaaaagtattgggtttgtttggggtgtagtgggaattttggtttggaaaataaaaaaggtaaaatagttaaagatttgttttgttagaggatgtttagaagttaataaatgaggtagaagaggagatagaaagataagagagaagtaggggtagttggaaatggagtttatggttatgtttataatttaataatggattatatagggattttaatatttggttgttttgttgtttgtgttgtgtttatatagtagaattatgtagttggggttttgggtttagttggattttgtttttatagtatgaaggtgatttttggtgaattgtgatttgggaagtttgtgtagtttagtagtttttatggtggtttggatataggggaagttgtttaattatagggttattgttttttattttagttggatttagtttgggttaaattttagattggtatttttttatgagagttgtgtatgttattttggttttttttggtggtagaggttggttgaaattttaggtggattttggaggtagatgttggttttaagggagttttggttggtttgttttttttggaaagttttgataaaagtatttggggtaggggttatattttttttgtatttaaaattttgaaattttaaatttttttaaatagttttttataatttttttgttagtttattatgttttaaaaattatttataggttttagtattaatagttattttattgtatagaagttttttagttttttttttttatttaagaatgagatattttttgtttattttgaattttataggaataatttagggtgttttgtttttataaataaaaaatttttaaaaaat

SEQ ID NO: 4042 - DNA, 2323 bp, Artificial Sequence
  chemically treated genomic DNA (Homo sapiens)
attttttaaaaattttttatttataagaataagatattttgagttatttttgtaaagtttagaatgggtagagagtattttatttttaaataagagaagggagttgagaaatttttgtgtagtaaaatgattgttggtattaagatttatggataatttttaaagtatagtaagttaataaaaaagttataagaaattgtttggagggatttaaaattttaggattttagatataagagaagtatagtttttgttttgaatgtttttattagggttttttaagaggagtaggttaattaaagtttttttaaagttagtatttgtttttaaaatttgtttggagttttagttagtttttgttattaaaaggagttagggtggtgtgtatagtttttataaaaaggtgttaatttggggtttggtttggattaaatttgattgagatagaaagtagtgattttgtaattggatgattttttttgtgtttagattattatagagattgttgggttgtataagttttttggattgtagtttattaggggttatttttatgttgtgagaataaagtttgattgagtttagggttttagttgtatggttttgttgtgtaaatatagtgtagataataggatgattaaatgttagggtttttgtgtgatttattgttggattatagatatggttatagattttgtttttaattgtttttattttttttttgtttttttgtttttttttttattttatttgttggtttttaaatattttttaataggataaatttttggttgttttgttttttttgttttttaagttagggtttttattgtattttaaataagtttagtatttttaataggtatggttttagtagaggtggttttattgaggtttgtatggttatatgatgaatatttttttatttgtttttatgaataaaatttgtttaaaattaggtgtgggaggaggaggttaggaaaagggttgtttttttttttttttttaattaattaatttatttttaattgttgttatttttgttttttttgttaggttttggttaatagaaatttggaatgtaggtttatatttttgtttttaggtgtttgaggatgtattttgggaagtgttgttgtatttattattgttggtggttatttgagaaatgttgtgatggattggtttggtaaagtttttttttattgtttgtaggttgtaatttaattagttatggttagagggaggtattattatttatatattaatgattgtttttaaagtaaatagagttgggatgaggtttttgatttttttagtgtttttagttgggatataaaagaaaaaaaattttagagatattggggtgggatatttgatttgaattttgattttttttgtaagtttttttattaaattttgttgatttttttttttgtttttttttttttttatagtttttatagataagtgttttgtgtgtgtatatgtaaatttagtagggttattttatttttttattgttaataatgttagaaagttttttttatttaggatattttttattattttataatagggatatggattttttaattggagtgaatgattttgttagaatataatagattaataattttttaatttataataaataatttttgtaaaaataaaggatgatatttgtattttgtaaagtgttaattaaattgtttgtggtttggttagtttttatttgtttattagttttgttgagtataagtgaatttaagataaatgttagttttttttggataaattttatagttaagtagaaattgttaaagtatataggagaggtaaaagtagagttgtgtttttattgatagaaaagttaattttgtaggatggatttaggtaagagtttgtgatttttgttttaatttaagtttgtatgtttataatagggttgttttttttgggagggaatgagttaattttgggagttgaaagtttaatggagtaggttggttggggttttttagttgtagggggaagaaatagttttgtttgtttattttgttttgtaggagtgagtgttatgtattttggtttagatagggtgataaatttggggtgtttggataatttatatgtttatttttatttttgttgtatttgattttttgaggattattgtattgggatatttgattaagttatgtgtttagatataatattttagtattttattttgttttggagagttttagagtgtttagttgatatgatggaaattttttgtgtagagttatttagagtttttaagaaatatgaattttta

SEQ ID NO: 4043 - DNA, 2466 bp, Artificial Sequence
  chemically treated genomic DNA (Homo sapiens)
gtttgaaataaataaataaataaataaataaagggtttttatgtatgatgtttgtgttttaagtaatttgggtaagagtgatattattgtttgtttattagtatttgtaaagaaaaattaattattgttagttttttttaaaaaaatgtatttgttaaaattgtttgatgatatggaaatttatattgaggtgtttatatttaggggtaattaagttttttttgtagttggggtttataattatattttttttattttataaaaattaaaagtttaggaattatgaggaaggagtaagaataaatattattataaattttaaattaatagtgttgagagattatagtagttttattttgttatttggggttagagattgtttatatttattttgtggttagtgtttattggaaagtaatgtagtatatattatggttgtgtttgagttgatatttattaatattgaattaattgtattttaatttaaagattttgtaagtgtttttttttttaattgggaatttggtagaatgttatatttaaatattaaatgttgttaattatgttagtggtattttagtttggataaaatgttttttttattgtagttaattgtttgaatatttgtagattgatatattttttgtagatatttatgttgttttttttttataattttattttattttttttttatttttggtgttgatttaaagggtttttattattttatgttgataatttgtgttttatggttgttggtgtgattgggagtagttgaagttgtgtgtaataatatatatatataaatatttgaataggaaaaagaaggtttgtttgatgtagattaaggaagaaatgtatttaaataaataatgttattagagggattttgattttgaattatgaataggtagggttagatttggaagggtatttttttattgtttggtttgtatgggtgggtgttagtgttatggtttattttaaaaagtaggtttttttaggttttatggtatagggagttgagttgggtttatgttagtaggtttatgatgttattgttgtagtttgtttatttggttaggattattaaaataattttttttgagaagaataaatttgtttttgtagaaagttaaagatttgagaggttttaattagtttattttgtttttgtttttggttgttaaatgttattgtagagtttaaagaatatgatgttgtgtgttttttttttttatttttgtgtgggggttttttttttttttttagtattttttgtgaatagttgaaaatgagtggtaaaatgatatttgatttagaaagtaagagtattaggaagtaaaattggaggtaaatatagtagttaattttattaggtatagttggtgttgtttgtggttgtttttgatagtgtggttgatatagaattatttgtgtttgtttattagttttttttaatttgtgagaaaatggtttgggttggttatatggtagttagataggttaggtattatgggaatataaaagttggagtttttagtagagttaattattaatgtgttttttttttgttttatttaggagtgttgatagggttttgatagtttgtatttgttattagttggttgtagttttagttaggtattaatgagatttttggttttaggttttttggtagagtttagagtttagtttggatttaggtgttgttattaatttgaagtttgtttgttttttgagtttttttttgttgtttgttgtgtttttattttttaggttttgttttggttgattatttatttgtttggaattttgtatgtttttgtaaagtatttgtttgagtttagtgaagtaaggttaggaaatgtgtgattataaagtttataattttttttttttttgtgttattttttttttagttaggaaaaaaaaaaaaaaaattagaaagttaagttgaattttttttttgtttgtttggatgtgtattaaggatggattgttttgttttaatattagtggggtgttttttttttaaaatttagtttagagagttatttatgggtatattttaatatttttatttagtaagtaaaatgtaggtgtttttgatagtaatttttttaaatagaaaattttattttaatatttttaatggtaagtagtttgtgtgttaatatgattggagttagggtgaatgagaattatattaaaattttttagttattagtttttttttttttttttttttttttttgtgatggagttttgttttgttgtttaggttggagtgtagtggtgtgattttggtttattgtaatttttgttttttgggtttaagtaatttttttgttttagttttttgagtagttgggattgtaggtgtatgttattatttttggttaatttttgtattattagtagagatggggttttattatattggttaggttggttttgaat

SEQ ID NO: 4044 - DNA, 2466 bp, Artificial Sequence
  chemically treated genomic DNA (Homo sapiens)
gtttaagattagtttggttaatgtggtgaaattttatttttattaataatataaaaattagttaggagtggtggtatgtgtttgtagttttagttatttaggaggttgaggtaggagaattgtttgaatttaggaggtggaggttgtagtgagttgagattgtattattgtattttagtttgggtgatagagtaagattttattataaaagaaaaaagaaaaaaaaaaaagaattggtagttggaaggttttaatgtggtttttatttattttagttttagttatgttgatatataagttatttattattaaggatgttaaggtgaggttttttatttaaaaaaattgttgttagggatatttgtattttatttgttgagtggaaatattagaatatatttgtgggtgattttttaagttaagttttggaaagaaaatattttattgatgttagggtaaaataatttatttttggtatatatttaaataaataaaaaaaaaatttagtttagttttttaatttttttttttttttttttagttgggggaaggatgatataggggaagagaggattatgggttttataattatatattttttagttttgttttgttgaatttaggtagatgttttgtagaaatgtgtaggattttaggtaggtgggtgattaattagaataaggtttaaggagtgggggtatagtgggtagtaggagggagtttagggggtaggtaggttttaggttgatggtagtatttgggtttaggttgggttttgggttttgttagggagtttggagttaggggttttattagtatttggttaggattgtagttggttgatggtaaatataggttattaaagttttgttagtatttttgaatgggataaagaaaaggtgtattaatgattaattttgttaaaagttttggtttttgtatttttatggtgtttggtttatttggttgttatgtgattggtttgggttatttttttgtagattggggaaagttagtgagtaaatataggtggttttgtgttggttgtgttgttagggataattgtggatagtattagttatgtttggtgaaattagttgttgtgtttgtttttagttttgttttttggtgtttttattttttaagttgaatgttattttgttatttatttttaattatttataggaggtgttaaaaagggggaaaaggtttttatgtaaaaatgggaaagggagatatataatattatgttttttgaattttgtaataatgtttggtgattaaaggtgagggtagggtaaattaattaaaattttttaggtttttaattttttgtaagagtaaatttattttttttaaagggaattattttagtgattttgattaaataagtaagttataataatgatgttataagtttgttggtatggatttagtttggttttttgtgttatggggtttggaagaatttgttttttaaaatgggttgtggtattagtgtttatttgtataagttgggtaatgagagggtgtttttttaagtttgattttgtttatttgtggtttagagttaaggtttttttagtggtattatttgtttaaatgtattttttttttggtttatattagatagatttttttttttttgtttaaatatttatatgtgtgtattattgtatgtggttttaattgtttttaattatattagtggttataaagtatagattattagtatgaggtgataaaggttttttgagttaatattagaaatgaagagaaaatgaaataaagttataaaaagaggatagtataaatgtttataaagagtatattagtttgtagatatttaagtaattagttataataggaaagatattttatttaaattaaagtattgttgatatgattaataatgtttgatatttaaatataatattttgttagatttttagttaagaaagagggtatttgtgaagtttttggattggaatgtagttagtttagtgttagtgaatattagtttaaatatagttgtggtgtgtgttgtgttgttttttaatggatgttgattatagaataaatgtgagtagtttttagttttaaatggtagggtgaggttgttgtaattttttagtgttgttggtttgaggtttgtagtggtgtttatttttgttttttttttgtggtttttaaatttttgatttttgtgaaatgaaggaaatatggttataggttttagttgtaggggagatttggttgtttttgggtataagtattttagtgtggatttttatgttattaagtaattttagtagatatatttttttgaagggggttgatagtaattggtttttttttgtaagtgttgataggtaggtagtggtgttatttttgtttgaattatttagagtataagtattatatataaaaattttttatttatttgtttatttatttattttaaat

SEQ ID NO: 4045 - DNA, 2473 bp, Artificial Sequence
  chemically treated genomic DNA (Homo sapiens)
tttagtttataattagtttttagtttatggtggtttttttttattttttaaatgttaaagtttttagttttttattttttttttatttttgattttaagtttttaaattgggtgattattaatattattgttaggagtatttttagagtattttatatttatagtgtttttttttttttaaattgtttttggttttttttttggaataggtattaaaaatattttattggataaatttttttttttagaagatatattatgaatatggttggagaaggtaggattataatttggagaatttagggttgattttttttatttttttgtttttttgttgtaaagtttggagttttaggaagtgttgttaaattattttttattttttttttaagagtagggtagaataaattgttattttgtttggttttgttttttatatataaggttttttaggttttggaatttaggttattggtattttaattaatgttaatgattgggatgattttttttttattgaatttgagtaagggaaataaataggtaaatttgaataaagttatgtgtggatgtggtattttttagaaaagttgatttttttgatggttggttagggtttttaattaggtttatattttttttttatatatttttaattttgaatttttttagtttaaatagaaattggttgtagggggaagtaggtagatttttttttttaatatataaatgattttgggtttttggaattagaatttttatttttttattattaggagtatttttattttgagattaatataattagaatgtgtttaattataattttataataatagaaaagatatatagtaaatgtttttaaatatttggaatttggttttgaaattgatttggtatttaaattgatatgtatattttagttgggttaaaatatagttaaggttttttttagagatattttgttttatttttttttttaagtaaatttttatttttttttttaatttttatagtttaagtgttttatttagtttaaatgttagggatttaaattgttattttagtggaagaggtttgattaaaatttgtgtttttattaaattattggatagtggtttttgggttttgtttatattagtgttaattttaatttaaattttgtataattatatttgttttgttaaatgtatttattaggaatatattataaattattttgtattatgagttgagtttttttgtttattgtaaagtgttttgaaattagtattataagtaattagttgtaagtgttattttatttttttaatgttttattaattaaattttatggtagttgatgtgatgtttaagtttttaatatataagattagtattatttattttttgtatttgattatggtttttaaatttgatttgttatttgtgtatttgtttttgttggagttttgttttttttttagtggttttttaatatgtggggttttgtatggatattagttgtatgtgtattttttgtagaaattggaaataaaaatttattttttatgttgtggaaatgtatagttttaaagttaggaaatttttttaatggaagaagagttttatttatttttttgagttatttatagtgattttttatgatttttagattaatgttaaaatgttataatggaaaaatttttttgggtaagtttttttttatgttaagaattagagaaaggaattatgtttatttaggtagattataatttttattttggttttagttttttaaaaaattagatatatttagtttaagtatttaattaggaaaaaaaaatgtattttttttttattatgtgatatgaattattttgtattaaatataaaattttagaatttatgtttgtaaagaaatatagaataatttatatttaataattttattatatgtatatataaaattatagtaaaatatgatatattttataggatttttttgtttttttatgatgttattgaatatttgtaaatgtttaaatggaattttttttttattttttatataagtttaaaaatataaatatatatgtatatatatatatttatatatatgtatttttttaattaaaggtaatatttattggtgttaaaattaatagttttattggataatggttttatggatattttagaggtagttttaagtttgttgtgggtataggtatgttggatatgatttttttgtagggatgtttttttggtggttgtgggggatgtttgtggttttttgtttgttagtgttgagtttagttttatagtgagttgagatgaataggtgtttttttttttggtggtggtggtatgtgaggttggttttttgtagaatagtgttttagtgggagatttttagttttatggtttttttttttgattatttagtaggaaaaatatatgaaagtgtttttttttgttagttttgttgatg

SEQ ID NO: 4046 - DNA, 2473 bp, Artificial Sequence
  chemically treated genomic DNA (Homo sapiens)
tattgataaaattggtagaaaaaaatgtttttgtatattttttttgttgggtggttagaaggaaaggttgtgaagttaaaggttttttattgagatgttgttttgtaaggagttgattttatgtgttgttgttgttagagaagagagtatttgtttattttggtttattgtgaggttgagtttagtgttggtaggtgaggggttgtaagtattttttatagttattgagagggtatttttgtagggaaattatatttgatatgtttgtgtttatagtagatttaagattgtttttaaaatgtttatgaagttattgtttagtagagttgttagttttaatattagtgagtattatttttggttaaaaggatgtatgtgtataggtgtatgtgtgtgtgtgtgtgtttgtgtttttggatttgtgtggagaatgaagaaagggttttatttaggtatttgtaaatatttgatggtattatgaaaagataaaaaaattttataaaatatattatattttgttatgattttgtgtgtatatgtaataaaattattaagtataaattgttttgtatttttttgtaagtataaattttaaaattttgtatttagtatagaataatttgtattatataataagggaaaaatatattttttttttttgattaagtgtttagattaaatgtatttggttttttggggaattgaggttaagatggaaattgtagtttgtttgggtgaatgtaatttttttttttaatttttgatatagagaaaaatttgtttagggaaatttttttattatggtattttagtattaatttgaaaattatggggaattattgtggataatttaggggaataagtggaattttttttttattaaaagaattttttgattttgaggttatgtatttttataatatgggaaatgggtttttatttttaatttttgtaaagagtatatatgtaattggtatttatataaagttttatgtgttgggaggttattgagggaggagtagagttttagtgagggtaaatgtataaataataaattaagtttaaagattgtggttaaatgtaaggagtaaatgatattgattttatatgttaggggtttggatattatattagttgttatggagtttgattaatgaggtattaaggagatggagtgatatttatagttagttatttatggtgttaattttaaaatattttgtaatagataaagagatttggtttataatgtaaagtaatttgtggtgtgtttttggtgaatgtatttagtgaagtaaatatagttatgtggaatttaaattaaggttgatattaatgtaaatagagtttaagaattattgtttaataatttgatgaggatataggttttaattaagttttttttattaaaatagtaatttaaatttttaatgtttaaattggataaaatgtttaagttgtaaaggttggggggaaaaatagaaatttatttgaaaaggaaaatgaaatagagtatttttgggggaaattttgattatgttttgatttaattgggatatatatgttgatttaaatgttaggttgattttaaggttagattttaggtatttgaaggtatttgttatgtattttttttgttgttgtaaagttatggttggatatattttggttgtattgattttagagtaaaaatgtttttagtaataagaaagtggggattttgattttgaggatttagaattatttatgtattaaaggaggaaatttatttgtttttttttgtaattaatttttatttgaattaaaaaaatttaaaattgggggtatatgaggaaggagtatgggtttggttagagattttggttagttattggagaggttagtttttttagagggtattatatttgtatatggttttgtttgggtttgtttgtttattttttttatttagatttaatggggaggaggttattttagttattaatattaattaaaatgttagtagtttaggttttagggtttgggaggttttgtatatgagaaataaaattaaataaaatagtaatttattttgttttgtttttggagggaaaataaggggtagtttggtggtattttttggggttttggattttatagtaaaagagtaggaaggtaagggaaattaattttgaattttttgaattatgattttgttttttttaattatatttatgatgtattttttaaggaaaggaatttgtttaatgaggtgtttttaatatttattttgaagaaaggattgagaataatttgggaaggaaaaaatgttgtaaatgtaaagtgttttgaaaatgtttttagtagtaatattaatggttatttaatttaaggatttagagttaggaatggaagggaaatgggaagttggagattttgatatttgggggatgaaggggggttattatgaattgagaattgattatgaattagg

SEQ ID NO: 4047 - DNA, 2437 bp, Artificial Sequence
  chemically treated genomic DNA (Homo sapiens)
ttgggaaggttggggaggtagagttggttttttagtagtttggggtttttttgggtggtttttgtgtaagttaaatatgttaagaaagtttggttgtaggattagtgtttgattagatgtttttgttttttattggttggtgttgttatatatatatatatatatatatatatatatatatatatatttttgatgttgtgagatttggtagttataggtttattgggtatttttttttggagaattgtttgaggttggtagaattatttggttttaaaatgtttggaggtttagttttttttatttatttttagttgatttgatgggttttttgttgtgttttttttttaaggtaggatttgttgtggataatttattttttatatttttgtttggttttttttatttttttatttagttttgtttatttttttttttttaataatatataagtattaaatttttgttttaggatttgtttttaggagattatttaagttaagtggttatttggtttagttaatttttaagattggtatttatatggttgtaatatgtagaattgtatatttaaaagggtgaattttattgttttttaattatattttaataaatttgtttttagaaataagatgaattttatggaaaaatagttattgttattttggagaaaatatttaaatatgttaattaatgaaaaattttagaaaagtaaaaagggaggtagggaaaagttattttgtatttaaaatatttttttggtttattggtttgtagttgttataggtggaggataagataaggggtgggtttttttagggtgttttaggtgttgattgagtagttagtatgtgataaaattttttttttgagagaaaaggaggaagtataagatagggaagggaagtgtagttttaggaaaggggtgggtggaggggttatggtttttgttgtgttatttaaatgtgtgttgtagggatttttgagggttgtgtttttatttgtttggttgttttgtgtttatagggttagtatgtgattatttgggatttggtgtgggtttttttttggttgttttattttttatttattagttgtgtgttaatagaaagttttttgattgaaggatttgtttgggatttttgtaataaaaatagaaggatttgttataaatgttggaaggattttttgtaaaagtggtattttttatgtgattatgagttttagaatatattgttattttgggttgtaagtttggtttttttattgagtggtagtgatagatgttttttgttaatgtttagtgattgaatgttattgtagaggtttgtttttatttatataatttgtttttttttttttgtagttattgtgttatgtttgttataaaatttatattttttgtatattgttggttttttttagtagtgagtttttgtgttaattttgttttgttttttttttggtttatttttgaggatattgggggataaatagtattattattgttaagtgataataaaggttggtaggaatatatttttagtttggggtggttataaggaaggaaagaaataaagaaaaaagtttatgaagttgttggagttatagtttttttttgggaatttagtttaagaatataatttattagaaataaaaagttttatttagatggagatttattgaagtatttgttattataataaaatattgagaataatttgaaaatttttttataggtaaataaatgatgataaatttttttgattggttatggtaggatttttaataattatggggtattggttaaatgtggtaaattgagtagtagtttttgtttttattgtttttttaagtattattaaaataaaagtaaaagggaaaagtatataaatgtatagagataaagaaaatgggaggggagaaaaaggtaaaggaaatagtagataaggaaggttaataaagatggaaagagtgtgaatagaaaaggtttaagtttttgaggaggggatattattaaaatgtgggttattgtgtgttatagaaatttagaaaggtttaggaattggattttttaagtattagggaaagtaggatgaggttggagttaagagggaaagtttgtaggggaaataagtagatgtttagaagatattgttagggttttagtggttttagaattatttttttttagttgttgggaagtgggagtgttttttttggagaaatgatttagatatatttttaaggtggagatatttagtagtgggggtaggattaaggtattagatagaaaggagtgattatgatagaaaaatgtgagattatttaggtttaggttattagtttggtgtttaatgatttgtaggaaaatttataggttagtaagtgtttttattatatttatgtgtatatttttatatgtatttatatagat

SEQ ID NO: 4048 - DNA, 2437 bp, Artificial Sequence
  chemically treated genomic DNA (Homo sapiens)
gtttgtatgagtgtatgtgaggatgtgtatgtgagtgtggtgggggtatttgttgatttgtgggtttttttgtaggttattaggtattaggttagtgatttaggtttgagtgattttatatttttttgttataattatttttttttgtttggtgttttagttttgtttttattgttggatgtttttattttggaaatgtatttaagttatttttttagagaagatatttttattttttgatggttgggggaggatggttttggggttattggagttttgatagtgttttttaggtatttgtttgttttttttgtagatttttttttttagttttagttttattttgttttttttggtatttggggagtttaatttttgagtttttttgggtttttgtggtatatgatgatttatattttagtggtgttttttttttaggaatttgggttttttttgtttatgttttttttatttttgttgattttttttgtttattgttttttttgtttttttttttttttttgttttttttgtttttgtgtatttgtatattttttttttttgtttttattttggtagtatttggggaagtaatgaaaataaaaattgttgtttaatttgttatgtttaattagtgttttataattattaagggttttgttgtaattaattaagagaatttattattatttatttatttgtaaaaggatttttaagttgtttttagtgttttgttatgatagtaagtgttttaataaatttttatttaaatagagttttttatttttgataaattgtatttttgggttgaatttttaggaggagattatgattttagtaattttatgagtttttttttttatttttttttttttttgtagttgttttaagttgaggatgtgtttttgttagtttttattattatttagtagtgatggtattatttgttttttagtgtttttggggatgggttgaggagggagtagggtagggttggtataagggtttattgttggagaaggttaataatgtgtagaaaatgtggattttgtgataagtgtgatatagtggttgtagaaagaaaggaataggttgtgtgggtgaggatgggtttttgtagtgatatttaattattggatattaataggggatatttgttattgttatttagtgaggaggttaggtttgtagtttgggatgataatatgttttggggtttatgattatgtgaaaaatattatttttgtagagggtttttttagtgtttgtgataaatttttttatttttattatagaaattttgggtaaattttttagttaggggattttttattaatatgtagttggtaagtgaaaaataaaataattaagagaaaatttatattagattttaaataattatatgttggttttgtgagtatagggtagttaggtagatgagagtatagtttttagaggtttttgtgatatgtgtttgaatggtatagtagagattatagtttttttgtttattttttttttggagttgtgttttttttttttgttttgtgtttttttttttttttttaagaaggagattttattatatattggttgtttagttagtatttggggtattttggaaagatttattttttgttttgttttttatttgtggtagttgtaagttggtgggttaggagaatattttaaatgtaggatagtttttttttgtttttttttttgtttttttgaggttttttattggttaatatgtttggatattttttttaaaatagtagtaattatttttttatgaagtttattttgtttttaagggtaggtttattgaggtataattgaaaagtaataaagtttatttttttaaatgtatagttttatgtgttatagttatataaatgttagttttggaggttgattaagttaaatgattatttggtttaggtggttttttggaagtagattttaaggtagggatttggtgtttgtgtgttattgaggagaagggagtgagtaaagttggataggagagtggaaggaattgagtaaggatgtgagggatgaattgtttatagtaagttttgttttgaggaaggggtatagtggaggatttattgggttagttgagggtgagtggaggaagttgggtttttaggtattttggagttaggtggttttgttagttttgggtagttttttagggaaggatgtttagtgagtttgtagttgttaagttttatagtattaggggtgtgtgtgtgtgtgtgtgtgtgtgtgtgtgtgtgtgtgtggtagtattagttagtaaaaggtaaaggtatttggttaggtattgattttataattaaatttttttagtatatttaatttgtataaaaattatttgaggaaattttaggttgttaggaagttagttttgtttttttagtttttttag

SEQ ID NO: 4049 - DNA, 2215 bp, Artificial Sequence
  chemically treated genomic DNA (Homo sapiens)
aggggtttagattggtaggttttagttttttgtttattgttttggggtttttttggaaaataggatgggaggtgaaaggtggatataggtttggatttttatattttttgaaataatttaggggtatagtatagaatttttaggagggagggtttggggatagtttttattttgtggatgagaaaattgaggggttttatttttattaaaagggagagagtttgaagttttatattttttatgtgtttatttatagttttttgttgggtttgggggatggaaaaatgatattttagaatggaaataaaatggtttattgtggtttttatttttgaatgtttattatgtgttaagtgtagaagtgttataattttgtaggttaagtttatattttgtatttattttgtataggagtatattgaattataaggtaataatttattttttaaaggatattattttaaatattattgtattttaagtagtatgttgtgtgattttgagtaagttgtttattttttttgggttaggttttagtttagttttgggatatagtagtgattaaaggagttgtggtttttgtttttttagagtttatagtttgggtagggaggaggaggtaaggaatggtaaatatataagaaaataaagattatttttgatggtaatgaatttagtgaataagagtaggagaatgtaaaagaaagtagtttagggggatttgagaaggtttttggggaggtgatatttgatttgagatttgaagaatgaggagtttggtaaagatttggggttgattagtgttttaggaataagtaatagtaagggtaagggttttgaggtaggatagagttattaatagtttaaggagggaggtttttgggttggtgagagaaagggaaggggtttagttgggtagtgggtaggggaggagtttggattttattttttgtgagatgtgttggttttggtggtagtgggggggtttgtagttttttgttataagggttgggggtgtggggatagttagagttaaaggttttttttttatagttttggtagttttagtttagaggtgttggtttggtggttggaagattgtattgtgggtatatttggggagtagttgttgagttagggttagagtgggttatgtggtatagggtaggattgttttggagtttataaggttaagatttttaggaggggtagtggagaatattttggatgagaatagtgtgttaatgaggaggaattgtgtattgtagatgtttaggtatatggttttttgtagttttatatagtttttgttttaggatagagtgtttgggtttaatgttattttttagttttgtgatttgaaataagttatttaatttttttgggttttatggttttagttgtgaaggggatatgatattattattatagttttataggttgttttttttttttttttttttttttttttttttttaattttttgagatgtagttttattttgttgtttaggttggaatgtagtggtattattttagtttattgtaatttttgttttttgggtttgagtgatttttttgttttagtttttttagtagttgtagtagttgggattataggtttttgttattaggtttggttaatttttttatatttttagtggagatggggttttattatgttggttaggttggttttaaatttttgattttaggtgaattatttattttagttttttaaagtgtttttaggttgtttatttttaatttaataaatatttgttgagtattttttatatgttaggtgttgtatgaggttttgtgtgatagtagggaataggatttttgtggtttttttttttttaagtatataattaatgttttagaattaggtttggtattgaggaaatttttagtaaatgtaagttatttgtttggagttttggaggttagaggaggtattttggaaggtagagaaggaggtgtggtgatagaaaaattttaaggaaagtgtatttttttttattattaggtgttgtagttggtttttggtatggtttattttatttttataattattttatgaagagggatgagtattagttttaatttatggatgaggaaattgaggtttagtttgttaatggtatagttaggattggaggtagtgaagggttggtttttttttttttttggggtttaatatttttatttgt

SEQ ID NO: 4050 - DNA, 2215 bp, Artificial Sequence
  chemically treated genomic DNA (Homo sapiens)
atagatgggaatattgagttttagagagaaaaagggattagttttttattgtttttagttttggttgtgttattgataaattgggttttagtttttttatttataaattggagttaatgtttatttttttttgtagggtggttgtgagagtgaaatgagttatattaggagttaattgtagtatttggtgataaaagggagtgtattttttttaggatttttttgttattatatttttttttttgttttttagggtgttttttttggtttttagagttttaggtaaatggtttatatttattaagagtttttttaatgttaggtttggttttaaagtattaattgtgtgtttagaagggaagggattatggaggttttgttttttgttgttatgtagagttttatgtagtatttggtatgtgggaagtgtttaatgaatatttgttgaattagaaataaatagtttgggagtattttgggaggttgaggtgggtggtttatttgaggttaagagtttgagattagtttggttaatatggtgaaattttatttttattaaaaatatgaaaaaattagttaggtttggtggtgggagtttgtagttttagttattatagttattagggaggttgaggtaggagaattgtttgaatttgggaggtagaggttgtagtgagttgagatggtgttattgtattttagtttgggtaatagagtgagattgtgttttaaaaaattaaaaaaaaaaaaaaaaaaaaaaaaaaaaaaagaatagtttgtggaattgtggtagtaatattatgttttttttatagttgaggttatgagatttagagaggttgagtgatttgttttagattataaagttgggaggtggtattgaatttaggtattttgttttgaggtaggggttgtgtggggttgtagggggttgtgtgtttggatgtttatagtgtatagtttttttttgttgatgtattgtttttgtttagagtgttttttattgttttttttaggagttttggttttgtaggttttaggatggttttgttttgtgttatgtgatttattttggttttggtttggtagttgttttttagatgtgtttatagtgtaattttttagttgttaggttggtgtttttgggttgggattgttggagttgtgggggagagatttttggttttggttgtttttatatttttaatttttgtaataggagattataggtttttttattattattagaattagtatattttatggagaataagatttaaattttttttttgtttattatttaattgggtttttttttttttttttattagtttagaggtttttttttttaaattattaatagttttgttttgttttagggtttttgtttttgttgttatttgtttttagaatattgattagttttaggtttttgttagattttttattttttaagttttaggttaaatgttgtttttttagaggtttttttagatttttttaggttatttttttttatatttttttgtttttatttattgaatttattattattagaaatgatttttgtttttttgtgtatttgttattttttgtttttttttttttgtttaggttatgggttttaagagagtaggaattatggtttttttggttattgttgtgttttagagttgaattagggtttggtttagagaaggtaagtaatttgtttaaggttatatagtgtattatttgaaatatagtaatgtttagagtagtgttttttgaagaataaattgttgttttatggtttagtgtatttttgtgtaaaatgggtataaaatatgaatttaatttgtagagttatgatatttttgtatttagtatatggtaagtatttagaaatggaaattataatagattgttttgtttttattttggggtgttatttttttattttttaaatttggtaggaggttgtgggtgggtatataaagggtgtggggttttaggtttttttttttttaataggaatgaaattttttagtttttttatttataaaatggggattgtttttaggtttttttttttaaggattttgtgttgtgtttttgggttgttttagggagtgtgggggtttaggtttgtgtttattttttattttttattttgttttttagagaggttttagaataatggatgggaggttggagtttattagtttgggttttt

SEQ ID NO: 4051 - DNA, 2431 bp, Artificial Sequence
  chemically treated genomic DNA (Homo sapiens)
tatattagatttattgagttaggtatgttgagggtggggtttagtaatgtatattttaataagtattttaggggatagtgatgtgtgtttaagtgtgaggattattgtgttaggagagggatttgtaaattttgatagataataggttttttaatgtaggtatttatgggttaaggagttagtagttatttttttgtgattttagtgtttagttagttaagagtttgttttagggtgagaatattttttttttttttatagttttttgaggggttatttttgtatagtttgattgagttagatatgggagagttgttgagtttgttgagtggatgttttatttttttagttaagattttatttttagaatgaagatggagggaagaatgtttttttatatgtttttttaataagttatatgatagatgaggaaattgaggtttagagtttaagttatttatttaaagttatgttgttaataaatggtagagttagaatttggatttatgtttatttgttttttagtgttttttttattgtagtaatttgtattttttgattagagttagttttaggaggatagggtttggttttttttggatttgagttggagtttttattgaatttttgattttgttgtgggaatttttagttaagttttttagatattgggaggtaggttttttttttgtttttattttgttagtatagtgggtattttggattatgttggattttgttagggatgtggtagttgttagttagttaagttataagttttagtaggtttgaatgatagttaaggtggttattgtgttaagtggattgtagttaggaggtgttttgtttagtttattttttattttttatttggaggttttttattattttaggtagggttttttttttttagtagttgtttagagtttgttatgtattttttggtttttatggtagtttagtttagtaaatggatttgaagttttataaatagtgtaatggtaggttgggaagttgttttgtgtaagaggatagaatatgtattttttgttttttgagttattttttgggattgggtgatgggagtgatttttagtgtagataaagttgaattatttttattttttaggtttatattttatatttggttttgtttttattgtttggtatgtttgtggtttttttttattgtttttgtttttatgtgatggtgtttttaagtttgtttttgggatgttttttgtttttggaatagttgtattagtttggggtatttttttgttatttgattttatagggaggtgtttagtggttgtgggtaatttttagatgattttgtttgtttgatgttattagattgttatttttggttttgttgtttatgttgtagaagttgggttggaatgggagaggaggaatgaaggaggggttgtttttggttttttattgttttagggttttattaagtaggtgtatttatttttttatatttatagagtatttattgaatgttaggttttagggtaattaaattgattttttatttatttatgaatttattttttaatgggtattgttttgtggtatggagtagtaattaaatgtgagggttttggagtaagagagtttggatttaaattttagtttgttatttattatttttgaaatttttttgtgttttagtttttttttggaaatgggagtgattatagtatttattttataaggttgttttgaagattaaaagagttaatatttttgtttgatatattgtaaatatataatgaatgttagtggttattattattaattataatagtattatgtattgtattaggtatttgggatatgaaattgaatgtgatgtagtttgtatttgttttgtattggtatttggattttaagggttttagatattgggatggggtatttagttaatattgttagaaagaatatttgttgtgtgtattattttttttattttatgttggagggtatttaagggaaatagaaattgaagtttttggttgggtgtagtggtttatgtttataattttagtattttgggattatagggaggttaaggtgggtggattgtttgaggttaggagtttgagagtagtttggttaaaatggtgaaattttgtttttattaaaaatgtaaaaaattagttgagtatggtagtgtataattgtaattttagttatttaggaggttgaggtagaagaattatttgaatttaggaggtggaggttgtagtgagtagagattgtatgattgtattttagtttgggtaaaagagtaagattttggtttaaaaaaaaaaaaaaaaaaagaaatatataaaaaagaaaatgaagtttttgttttaggaaagttttagattagtggttttttattttgttatatattagaattttttggagagat

SEQ ID NO: 4052 - DNA, 2431 bp, Artificial Sequence
  chemically treated genomic DNA (Homo sapiens)
atttttttaaaagattttgatgtgtggtagggtgaagagttattgatttaaggtttttttaggataggaattttatttttttttttgtatgtttttttttttttttttttttttgagttggagttttgtttttttatttaggttggagtatagttgtgtaatttttgtttattgtaatttttattttttgggtttaagtgatttttttgttttagttttttgagtagttgggattatagttgtatattattatgtttagttaattttttgtatttttagtagaaatagggttttattattttggttaggttgtttttaaatttttgattttaagtaatttatttattttggtttttttataattttaaagtgttaggattataggtgtgagttattgtgtttagttagaaattttaatttttgttttttttgaatgttttttaatataaggtaggaaaaatagtatatatagtaggtattttttttgatggtgttgattgggtattttattttaatatttgagatttttggagtttagatgttagtgtaaaatagatgtagattatattatatttaattttatattttaagtatttagtataatatgtggtgttgttgtggttagtagtaatagttattaatgtttattgtgtatttataatgtgttagatagagatattaatttttttaatttttagagtaattttatgaggtagatattataattatttttatttttaaaaggaaattgaggtatagaggagttttagaggtagtaaatggtgggttggaatttaaatttaaatttttttgttttagagtttttatatttaattattattttgtattataaagtaatgtttattgaaaaataaatttataagtgagtgaagaattagtttggttgttttagggtttgatatttagtaggtgttttgtaaatgtggaagaataaatgtatttatttggtaggattttggaataatgggaaattaagagtagttttttttttatttttttttttttattttagtttaatttttgtagtataaatagtaaagttaaaaatagtgatttaatgatgttagatgaataaggttatttgaaaattgtttatagttattggatatttttttataggattaagtagtaggagggtattttaggttggtgtagttgttttaagaataggaaatgttttgggagtagatttggaagtattattatataaaggtagaagtagtagggggaaattatagatatattaaatagtagaagtaagattaagtgtggagtatagatttagaagataagagtaatttgattttatttgtattagaagttatttttattatttgattttaggaaatggtttgaggagtagagaatgtatgttttgtttttttatataggatagttttttagtttgttattgtgttatttataaaattttaggtttgtttgttaaattgggttattataagaattagggggtgtatggtaagttttgagtagttgttgggggaagaagattttgtttgagatggtgaggggtttttaaataaaggatgaggggtgggttaggtaaggtattttttggttgtaatttatttggtatggtgattattttggttattatttaggtttgttgaggtttgtgatttaattgattggtagttgttatatttttgatgggatttagtatggtttgagatgtttgttgtgttgatagggtgaaagtaaggagaggatttgttttttagtgtttgagaagtttagttggaggtttttatagtaaggttaagagtttagtgagggttttagtttaaatttagaaaaagttaggttttatttttttggagttggttttggttaagggatgtaagttgttgtggtagaaaggatattggagggtagatggatgtgggtttaaattttgattttgttatttattagtagtatgattttggatgagtaatttaaattttgagttttggtttttttatttgttatatgatttgttggaagaatatatggaaaagtatttttttttttgtttttattttgggaatggagttttggttaaggagataaaatatttatttaataagtttagtagtttttttgtgtttaatttagttagattgtataaaggtgattttttaaggggttgtggaagggaggaagatgtttttattttgagataggtttttgattggttgggtattaaggttataggagagtggttgttggttttttggtttatgggtatttgtattaggagatttgttgtttgttaggatttgtaggttttttttttggtatagtggtttttatatttaggtatgtattattgttttttggagtgtttgttaaaatatatgttgttgggttttatttttagtgtgtttgatttagtaggtttagtgtg

SEQ ID NO: 4053 - DNA, 2460 bp, Artificial Sequence
  chemically treated genomic DNA (Homo sapiens)
tttgttttgggagattaagtttttttttgtttttagggtggtttagataaaggtggtggtgtgtttggttttttggtatttgggttgtttttttgttttttttttttttttgttttagggtatttgtagaggttttttttataaaggagttggaggatggggggtagggttgggtagttttaaggtaggggaagggagtattggtgaggttatgttttgttaggtttgattttttttttagttttgttatataggtatttagtgggtattaattgtggtttgttgaataatgattattttgagtattgagtgtggttagggtggggttttggtatatgtggatattattaatttttttgataagagatggggttttatatttaggttgaggaggggagtgtgttaagggagttattatttttttagtgtagttaagaggaaattgaggtttagagaggttgagttatttgtttaaggttatatggtttaaagtgggataaatttatttttgatttaggtttatttgattgttatagatggtatgttatttgttgttttaattgttatttaataaataattaataataaaaagagaaataatgaatatttagtaagtatttaatatgtggtaggtattgtgtttaaggtattatttatattaagtgatttaatttttttaataattttatgaggtaagaattgttattatatttattttatagatgaagaaattgaggttggtaaggtggggtaatgtattaaaggataaatagtaaggatttggtggagtgggttttaatttagttttttagaatttgtgtgttaaattatagttttattttggatggttggatgggggatggatagattgatggatgggattgatgattgatagttttgttttatttgtattaggtttgaggttgggtatttagtaggagtttagttagtattggttataagaatattgggtatttttatgtagtgtttgttggaggggttttatgtttttagtagggttggagtttgggggtggtgggtagtgtgtttgggttgttgggggggtttaatttttttttgagtagagttatggtggtatgatggatgtgtttgttattgtggggagtttagggtatagtagttgtttggaaataggttgtttttgtggtttatatttagatttttgttattattttaaggatttttttttttttttttttttttttatgatggagttagattttgtatgtaggtgagaaattgtagttaattttattagtagttttttgttattagggattatgggggtttttggggtttggttgtgggtggggaggtaggtgggtgttgggaggatgaggggaatttgtagtgggaagttagtgttttatgggtggtttagttgaggtttggaaaaattttgatgttggaatgttttttttattggttttattttttttaagtttttttgataaaaaatgaggttgagtttttttttttaatggtgtaatataagaagtattagtttttagagttgagggtgtgtttaaaggatttgggtagggttgggtttttggggggtttagagtaggggataggtgtggtgtttttagtatagtaggtattaattggtttttatgttggtggttttgagaggggattaattgggttttggggaattggttggggatggggttatgttttagttagggttgggtttggggataggagtgtggaggagtaatagtgaggattttggggttattttagtatgggtttaaattttagttttgttttttgggtaagttatttgttttttttgtgatttagttttttttttaatgaatggggaggatttaaaagggtggttatgagaattaaataatataatttgtgtaaagtatttagtatattagttgggtatggtggtatgtgtttgtagttttagttatttgggaggttgaggtgggaggattgtttgagtttgggaggttgaggttgtaatgagttgtggttatgttattgtattttagtttgggtgatagagtgagattttgttttaaaaaaataaataaataaataaataaaatatttagtatatagtaagtgtttaatgaaagattataggtgtgtttattttgagggttatggggtgtttggttttaggtatgttgttaggattattttatttttattttaagtatttagggaggtaggaagtttatagtttatttattggttataggtagaattgaggttttaggaggaatggtatttgtttagtgatattggggagtatgagatgttagattgatttttattttttatttgtttattaggtttttggttttattgttttagttattattttaatttttttgattagtagtgttgaatgttgattttgaaaattagattttaatgttgtttgttttaaatatttttgggttttttagtgtt

SEQ ID NO: 4054 - DNA, 2460 bp, Artificial Sequence
  chemically treated genomic DNA (Homo sapiens)
ggtattggggagtttaggaatgtttggggtaggtggtgttgaggtttgatttttagggttagtgtttagtattgttaattggggaggttgagatagtggttgagatagtgaagttggaagtttgatgggtgggtggggggtggaagttaatttgatattttatgttttttagtgttattaggtaaatgttattttttttggagttttagttttgtttatggttagtgagtggattgtggattttttgtttttttgagtgtttagggtgagaatgaaatagttttgatggtatgtttggagttaggtattttatggtttttggagtaagtgtgtttgtggttttttattgagtatttgttatatgttagatattttatttatttatttgtttatttttttgaggtagagttttattttgttatttaggttggagtgtagtggtatgattatggtttattgtagttttaattttttaagtttaagtgatttttttattttagttttttgaatagttgggattataggtatgtgttgttatgtttagttaatgtgttaggtattttatatgaattatattgtttgatttttataattatttttttaggttttttttatttattgaggagaaaattgagttataggggagataaataatttgtttaagagataaagttgggatttgggtttatgttggggtgattttagagtttttattgttgtttttttatatttttgtttttaagtttaattttggttggggtgtggttttatttttagttagttttttagggtttagttaatttttttttagggttattggtatgagagttaattagtgtttgttgtgttgggggtattatatttgttttttgttttgggttttttagaggtttagttttgtttagattttttgggtatatttttggttttggaagttgatgttttttgtattgtgttattaagaaaaaggatttagttttgttttttgttagggaagtttggggaaaataaagttagtgagagaagtattttagtgttgggatttttttaagttttggttgggttgtttgtggagtgttgattttttgttgtaggttttttttatttttttggtatttatttatttttttatttgtaattaggttttaagggtttttatggtttttggtgatagggggttgttggtggggttggttgtggttttttatttgtgtgtagggtttggttttattgtgaaaggaggaagagggaaaaaaaggtttttgagatggtgataaaggtttgagtgtgggttgtgagagtagtttgtttttaggtaattgttatattttgggttttttgtggtggtgggtatatttgttatgttgttgtggttttgtttgggagggagttgggtttttttagtagtttaggtatattgtttattgtttttaagttttggttttgttggggatatgaggtttttttggtaggtattgtgtgagaatgtttagtgtttttgtggttgatgttggttaagtttttattgggtgtttagttttaggtttggtgtaggtgggatagagttgttaattattagttttatttgttagtttgtttgttttttatttagttgtttaggatagaattgtggtttggtgtataggttttggagggttgggttgaaatttattttattaaatttttgttgtttgttttttggtgtattgttttattttgttagttttagtttttttatttatgaaatggatataataatagtttttattttatagggttgttgggaggattaaattatttaatataggtaatgttttaggtatagtgtttgttatatattaaatgtttgttaaatgtttattgtttttttttttattattaattgtttgttaggtgatagttggggtagtgggtagtatgttatttgtggtaattaggtagatttgggttgggggtgagtttgttttattttgaattgtatgattttagataggtggtttggtttttttgagttttagtttttttttgattatattggggaaataatagtttttttgatatgtttttttttttagtttaagtgtgaaattttattttttgttgggaggattagtggtgtttatgtgtgttagggttttattttggttatatttagtatttagaatggttattatttagtaggttatgattggtgtttattgggtgtttgtgtgatggggttgggagaggagttaggtttggtagggtgtggttttattagtgttttttttttttgttttggggttgtttagttttgttttttattttttagtttttttgtgaaaagaatttttgtgagtgttttggagtaagaggaggaggaggataagaaggtagtttgagtgttagggggttgggtatattgttgtttttgtttgggttattttggaggtagagggaggtttggttttttagggtagg

SEQ ID NO: 4055 - DNA, 2408 bp, Artificial Sequence
  chemically treated genomic DNA (Homo sapiens)
agttgtttttgaggtgtgaggataggaggggttgttgtttgaggttttttgtttatttttatttattgggattttttgtttggtttaggttttggataggtgtgttgtattggttgtagaggtggttttgggttgtataaggttggagtttattattttgggttttttttttattttggtttttgttattatttttttttattgttttagggttttttagtattttaaaaaagtttgtttaaaatttaaaaaaattattaatttttttagatttttttagtagggagggttggtttgaaattattttatttgttatttttttttttttttttttttttgttagggttttgttttgttgtttaggttggagtgtaatgggattttggtttattgtagtttttgttttttgggtttaagtgatttttttgttttagttttttgagtagttgggattataggtatgtattattatttttagttaatttttgtatttttagtagagatagggttttagtattttggttaggttggttttaaatttttgattttaagtgatttattttttttagttttttaaagttttaggattataggtgtgagttattgtgtttagttttatttgttatttttgtattataataatggttatggtggtaaaatgttttattgagtggtatggttgtttttatttttaatagttttttatttagggggtagttagtttattttttatttttttgatggggtggttatgattaatgttgttttagtaatgttttttttatatagggattattttttttggttagattttgataagtgttatttttgagttaataggtttttattaaatgttttagtgtgttttagtttgtattgttttgtgatatagggtagaggaggttttgtttttaaaagtggtttatgttgtagtagggggttttgaatgtttgtttttttagtggatggaggggaggggttaaggtaggttggagattatttttgggagtggaggttttggtttttttagtagtttttagttgtgtgttttttataggtggtgagtggttgtttgtgtggtatagtgagtgtgtgggaggttgtgatgggtaggaagatgatggagtttgttgtgtttgggggttagtatgtggagatgattgttatggttttggatgagttagagtggtgtttgtttataggtttgtgggatggtataatgaagatgtggaattataatattggtaaatgtttgttgattttttttagtttggaatagttggaggttagttttgtttgttaattatagttagggatggttttttgggaagtaaagtatagtttttttgattttgggatgtattattttttgtatttttttgaaagggtgtttattatagttaggtggtttggttttaaatttttttgagtttttgtgtttttatgtatgaaatgaagataggtaatagtgtttggattaatgggtttttattaaggttagttattgttgttttttaaatttgttagtattttttattttatatattggagttttggattgtatttttagtagtgggattagttaatttatagttatttatggttatttttatttgggaaatgtttgatggtattatagggttagtttatgggagtggtatagggtaaagttagtagttttattttaatttttgtgatatagttttttaattaatttagaaagtgtatttagttggttaggtagtggtttatgtttgtaattttagtattttgggaggttgaggtagggggattatttgaggttaggagtttgagattagtttggttaatatggtgaaatttttgtttttgttaaaaatataaaaaaaattagttaggtgtggtggtggttgtttgtaattttagttatttgggaagttgaggtaggataagttgggaggtggaggttgtagtgagttgagattttgttattgtattttagtttgggtagtaagagtgaaattttgttaaaaaaaaaaaaaaagaagaagaagaaagaaagtgtatttagttaagatgttaggggttgagtattgttttagattttattatttagtagtgatttgattttagttaggttatttgtttattttttagttattttttttgtaaaatggatatggatgtttattttattttatttttttaagtttattaaatgagggaataggatgtgagaatatgatgataaatatatggtggtattatttgtaggtgatttttgttatttagagatttgattttttgtttggtatttttaggaagatatttagggtttagagttattttttttgataagttttttagttttgtttttttttatttttaatagattagtgggattatttatatgaataaagtgttttatg

SEQ ID NO: 4056 - DNA, 2408 bp, Artificial Sequence
  chemically treated genomic DNA (Homo sapiens)
tatagaatattttgtttatatggataattttattaatttgttgaagatgaaagaaaatagaattagaaaatttattagagaaaatggttttgggttttaaatgtttttttaaaggtgttaagtaagaagttaaatttttggatgatgaaaattatttataggtgatattattatgtatttgttattatgtttttatattttatttttttatttgatggatttaggggagtgagatagggtaggtatttatgtttattttatagagaggatagttgggaaatgggtaagtgatttggttaaggttaagttattattgagtgataggatttggagtagtatttaatttttggtattttggttaagtatatttttttttttttttttttttttttttttttttgatagagttttatttttgttgtttaggttggagtgtgatggtgggattttggtttattgtagtttttattttttggtttgttttgttttagttttttgagtagttgggattataggtagttattattatgtttggttaattttttttgtatttttggtagagatgggagttttattatattagttaggttggttttgaatttttggttttaggtgatttttttgttttgattttttaaagtgttgagattataggtgtgagttattgtttggttagttaagtatattttttgagttggttaaaggattgtgttatagaagttagggtggaattgttggttttgttttatgttatttttatggattggttttataatattattaggtattttttaaataggggtgattatgggtggttgtgaattaattgattttattgttagaaatgtaatttaaagttttagtatgtggaatgagaagtgttagtaaatttaaagagtaatagtagttaattttagtggaaatttattagtttaggtattgttatttgtttttattttatgtatgaggatatagaggtttagggaggtttgaagttaggttatttgattatgatgaatatttttttagagaggtataaaaaatagtgtattttagggttaaaggagttgtgttttgttttttaagaggttgtttttggttgtaattgataagtaagattgatttttagttgttttggattgggaaaggttaataggtatttgttaatgttgtagttttatatttttattgtgttattttgtaaatttgtgagtaggtattgttttgatttatttagggttatggtggttatttttatgtgttggtttttagatatagtaaattttattgtttttttgtttgttatgattttttatatatttattgtgttgtgtaggtagttatttattatttgtagggagtatatagttgggggttgttggagaggttggggtttttatttttaagggtggtttttagtttgttttggttttttttttttatttattgagaaaatagatgtttagggttttttgttatagtataagttatttttgaaaataggattttttttgttttgtattatagggtagtgtaaattggaatgtattggaatgtttggtgaagatttgttaatttagaaatggtatttattaggatttagttaaagaaaataatttttatatggaaaagatattattgaaataatattaattatgattattttgttaaaaaaataagaaataaattaattgttttttaagtagggaattgttgagaataaggatagttatgttatttaatgaaatattttgttattatgattattgttataatgtaagagtagtaggtaaggttgggtatagtggtttatgtttgtaattttaaaattttgggaggttgaggagggtggattatttgaggttagaagtttgagattagtttggttaaaatgttgaaattttgtttttattaaaaatataaaaattagttgggggtggtggtgtatgtttgtagttttagttatttgggaggttgaggtaggagaattgtttgaatttggaaggtagagattgtagtgagttaaggttttattgtattttagtttgggtgatagagtgagattttggtaaaaaaaaaaaaaaaaaaaaaagtagtaagtgaggtggttttagattaattttttttattgagaagatttagaaaagttgataatttttttaaattttaaataaatttttttaaggtattgaagagttttgaggtagtgagagagggtggtggtaggagttaggatgggagagaagtttagaatggtgagttttagttttgtgtagtttaaggttatttttgtagttgatgtggtgtatttgtttagagtttgggttagataagaggttttagtgggtgggagtgagtagagggttttaggtagtagttttttttatttttatattttagaagtaatt

SEQ ID NO: 4057 - DNA, 2461 bp, Artificial Sequence
  chemically treated genomic DNA (Homo sapiens)
aattttagttgttagggttaagattagttatgtgttttttttttttggttatggttttggatattttaagttggtagtgagtgttaggtgagggggttgttaggagttggtaggggggattttatttttgtgttatttatgtttttaattaggggtaatttttttaaatttgtatttttaaattttttttttagtttgattggagaaattattttaatttttaatgatagtaattttaaattatagtaataataatttattgagtgtttatagtgagttagatatagtgttagtattttgtattagtagtttttaaattttttggttttaggaattttttatattttaagaatgattaaggtttttaaagtttttgtttatgtgggttgtatttattattaattattattttaggagttaaaataaattttaataatatttatttataatttatttaaaatagtaataataaatattatatgtgagtataaataatatatttttatgataaataattatattttataatatataaaatttaaagagaaggaagtgtggttttgttttatatttttgtagatttttataatgttagttttaatagaagatagtttgatttttatatttgtatttgtaagtttttgagatattatatgttatgtagtttttgtaatattttattgggagttttaaaaagtttttattgagagtaaaaaatttttataaataatatgtttgtattattgttaatattattttgaattttatggattatttgaaagggttttagagattttagaggtgtttataatatattgtggaaattgttgtttgatatatatgatgggtagtttttaatattgttttatttttatatatgaggaaattgaggtataaggagattaaagtgatttgtttaaggttatgtagttaggtattaaagttagttggggagttatttgattttggtgtttagggttttagtattgagttttgaaagagagggtaggaattgggtatagaaaaagttggaagggtaggttgggttatgagtgggggagttgggtgtgtagtgaggggtgggggtgggaggggattgggggattagttagttattaagtggttttggtgatagggttggagatggtagttggtggtggatgtagttttgggttggaaaattaataggtgattagtggtttaggggtaagttgtttattaggtgtggtagaggggtaggggtaggggtgggggggttgggaggaaatattattgatttttggtaggattgattaaatagttagatatttaaggttaaatttattaataaagtgagatatttagtttagtttggtggttgttgttgaaggttttaaaaaaattgtttattggggagtttttgataaattgtttttgttttttgaggtaagtgggagggaggatagattgtggggaggtttggtttggttgttgtttggtttgggatttatggtttgttttaggtttggattatagaattttggtgtttgtatggtatgtgtgtttgtattatagtatatgttatttgtatagggtatgtgtagatatatatgtgtatattatgttgtatatatttaaatgtgtttgtatatgtttttgtatgtttgtgtatatgttataatttatatttgtttatggtatgtgtgtatatatatgtatgtgttatagtatatgtgtataaatatgttttgtatgtgtgtatagatatgtgtgtattgtattatatggtatttatatatgtatatgttatggtatatatgtgggtataaatgtgttttgtatgtgtgtgtatatgtgtatgtgttgtagtatatagaatttgtttttgaggggtgagtatgtgtgtttgggggttaaattttttttttattgttttattgatattattattttttttgtttgtagttttaaaggtgttatatttgtaatgatagttatgattattatggggtggggagatggatggaaaagtagggattggaaaattgtatttaaaaggttaagttgtataatagagagaggtaggtgtgaataggaagaaagagggggaggaaaagtgaagggttggtatggtaagggttaaatattgtttggattgggagttgagggagagaaaatggtaggatttgggggtggttgggtagttgttgggggagtaaattaaagaataaaggatatgtaaatataatttttatttttattgatttattttttttaagatagagttttattttgttttttaggttggagtgtagtggtgtgattttagtttattgtaatttttattttttgggtttaagtagtttttttgttttagtttttagggtggttgggattatagttttatgtagttatgtttggttaatttttatatttttagtagagatagggttttattatattgtttaggttggttttgaat

SEQ ID NO: 4058 - DNA, 2461 bp, Artificial Sequence
  chemically treated genomic DNA (Homo sapiens)
gtttgagattagtttgagtaatatggtgaaattttgtttttattaaaaatataaaaattagttgggtgtggttgtatgagattgtagttttagttattttggaggttgagataggaaaattgtttgaatttaggaggtggaggttgtagtgagttgagattatgttattgtattttagtttggggaatagaatgagattttgttttaaaaaaaataaattaataaaaataaaaattatatttgtatattttttattttttaatttgtttttttaatagttatttagttatttttgaattttgttatttttttttttttaatttttagtttaaatgatgtttagtttttattatgttggttttttattttttttttttttttttttttttgtttatatttgtttttttttgttgtatagtttagttttttagatatagttttttagtttttatttttttgtttatttttttattttataataattatgattgttattataaatgtggtatttttgggattataggtagagaaagtggtgatattagtgaaataatggagaaagagtttaatttttaagtatatatgtttattttttaaaggtagattttgtgtgttatggtatatgtatgtatatgtatatatgtaaggtatatttgtgtttatatatgtgttatagtatatgtatgtgtaaatgttatgtgatgtggtgtatgtatgtttatgtatatatgtaaggtatatttgtatatatgtgttgtagtatatgtatatgtgtgtatatatattataagtaaatgtaggttgtagtatgtgtatgggtgtgtaaagatatgtgtaggtatatttgaatgtgtgtgatatagtgtgtatatatgtgtttgtatatgttttgtataaatggtatgtgttgtagtgtaagtatatatgttatataagtattagggttttgtggtttagatttggggtaaattatgagttttaggttaaatggtagttgagttaggtttttttatagtttgtttttttttttatttgttttaagaaataaagatagtttattaagaattttttagtaagtggtttttttaagatttttagtagtagttgttgggttgagttgaatgttttattttattagtgagtttggttttgggtgtttggttgtttgattaattttgttgggggttagtgatatttttttttagtttttttgtttttgtttttgtttttttgttgtatttgatgaatagtttgtttttggattgttgattatttattgattttttagtttgaggttatatttgttgttagttgttatttttagttttgttattaggattatttggtgattaattgattttttggtttttttttatttttattttttattgtatatttagtttttttatttatggtttaatttgtttttttggttttttttgtgtttagtttttatttttttttttagggtttagtgttgggattttggatattaaaattaagtgattttttagttagttttgatgtttggttgtatgattttggataagttattttaatttttttgtgttttagtttttttatatgtaaaaatggggtaatattggaagttatttattatgtatattaggtagtagtttttatagtgtattatgggtatttttggggtttttgagatttttttagatggtttataaaatttagaataatgttgataataatataaatatgttatttgtgggggttttttgtttttagtgaaagttttttaaaatttttagtggaatattataggggttatatgatatgtggtattttaaaaatttgtagatgtagatataaaaattaaattgttttttattaaggttgatattatagagatttgtaaaaatataaaataaagttatatttttttttttttaaattttgtgtgttgtgaaatatagttatttgttataggaatatattatttatgtttatatgtagtgtttattattgttattttaaataaattataaataaatattattaaaatttgttttgatttttaaaatggtaattagtgatagatataatttatatgaataagagttttgagggttttgattatttttagggtgtaaagggtttttgaagttaaaaagtttgagaattgttggtataagatgttagtattgtgtttggtttattgtaagtatttagtaaattattattgttatgatttggagttgttattattgggagttagagtgatttttttagttaagttggggaggggatttgggggtgtagatttggggaggttgtttttgattagggatataagtggtataaaggtgagattttttttgttggtttttagtagtttttttatttggtatttattgttagtttggagtgtttaaagttatggttaagggaaaggagtatgtggttgattttggttttagtagttgggatt

SEQ ID NO: 4059 - DNA, 2417 bp, Artificial Sequence
  chemically treated genomic DNA (Homo sapiens)
tatagtttgagtatatttatttattttttattatttatattagaatatttgaaattgggtgatttatgaagaaatagaatttattttttatagttgtggaggttgaggagtttaagattgagggtatgtatttgttgagagttttttggttggtggtgtagagttttgaggtggtgtaaggtattatattatgaggggtatttgtttgttatagtagtaagtataatttaagttaattttttttgtttatggagaattttttgttagtaagagaaatgaggtatttatttaagtgttttagtatagagatgatttataggaattttagattttggaggatgattttttatggtgatattaggttgttttgttatgtggtataattgtaggaggagttatttatattttttatgtgaatagtattttttgtatttgtataatttgttattttgggtaggatttttagaggagtgggtttgttgttgagattttaaggatgagtaggaattttatttatggagatggggaaaagttattgtagttggatgaaatagaagggatagagatatagtatatggaaaattagaggtatgtatgtgtgtagtagtaatagttattagtgtttattgagtaggaatgataggttagatagtgtgttaagttttttatatatattagtttatttaattttataatagtttgtgtaaatttagatattttggttttagagtttgtgttttaaattttttaatagattttgtttattattattaatattggtatagtattttatagtttataaaatttttttggatttatgatttgtttttattatggtaatagagtaattgtttttattttataggtgaagaaatagtattaatggttttgtgatttgttaaggttatatagagagtaaattgagaggttaagatttgaattttattttttggttttagataaaggatgttatagtaaggtgtttgtaaagtagtttttttttttttttttgttttgtagggaggtgaggtgtttatatttagattattataaggagttgttgagagaatgtttttaggttatgaatttagttttatatgtaaatttattgtagatttaggagaaggttaggaataaatgggtgggagaaggtttttgattttaaatagaaattgagttgattaaatatagtttgagtatatgtagaggttgtaggagggaaatgagattaattttaaattttgtgtatttagaagttttttttagaatttaggttttattggtaggaaattgttattttgtgtatttgtttattttttttatgttttttgttaggttttgtgttttattgagtttttattttttttgtgtatgtttataggttgttgggttggaaatagtttaaagttatttagattattttaggtattgagttgtattaaggatattttttgtgggtagagtaaagatatgtttttattttttagttgggtttattgaggtttttttttattggggaattggttgggtttttttggtagagatgtttgttatttattaaaaatgtatgttttttttattgtggtatagagttgtttttgagaaatatagtttaattaggaattatattttttagttaattttgtagttaagtgaggttatgtgatttgtttttattaatggaatatgaatagagtgataggttttttatttgggtaaaatagagttgatgtgttttttttatatttttgtttagtttttgtttggatttagattttagggaatggtagagttataagatgaaagtaaattgggtatttataaagagaaaatatttgtgttagtttattaaaatgatgagagttatttgttatagtagtaagtataatttgaattaatatatttttttttttgatttttggtaattttagttttttatggagataggggttggaatattatttgtttttttaaagagagttgtaatttattgttttttgttgtgtgttggttttatttttatatttggttttttgttttagtttttttgaatagaatagtagattttttttaagatagaggtgatttttatttaagtttatttgggattgattgtttagttttggttaatattaaaatgtgttaagattttagtgttataattaatgtttatttattttttaatttatgtggttattgtttagtaattttgttattgtatttgttttttttgaggttgttattggttgggtttgggttttaaatagtttttagttgtattggtggtttgatattagaaatttgggagaagaatggtgtaagaggaagagtgtattagtttatttttatgttgttgataaagatatatttgagattgggtaatttataaaaaaaaagaggtttaattggatttatag

SEQ ID NO: 4060 - DNA, 2417 bp, Artificial Sequence
  chemically treated genomic DNA (Homo sapiens)
ttgtaagtttaattaaatttttttttttttgtaaattgtttagttttaggtatgtttttattagtagtgtgaaaatggattaatatatttttttttttatattattttttttttaagtttttggtattaagttattagtatagttagagattgtttggggtttaaatttagttagtagtaattttaaagggaataaatatagtagtagggttgttgagtagtggttatatgaattggggggtaggtggatattaattataatattggagttttagtgtattttgatgttgattaaggttgggtagttagttttaaatggatttggataagagttatttttgttttaaggggaatttattattttatttaggaaaattgaggtaggaaattaggtgtgagggtgaagttagtatataatagggaataatagattatagttttttttgggggaataagtggtattttaatttttgtttttatggggagttaaagttgttaagagttaggaaggaagatatattaatttaagttatgtttgttgttataataaataatttttattattttagtaaattaatataagtattttttttttatgggtatttagtttatttttattttgtggttttattattttttagggtttgaatttaggtagaagttgagtgagaatgtggagaaagtatattaattttgttttgtttaggtgagaagtttattattttgtttatattttattggtgagaataggttatatgattttatttagttgtaaggttagttgggaaatgtagtttttggttgggttgtgttttttagagataattttatattatagtggggggaatgtgtatttttgataagtagtaggtatttttgttagaggagtttagttagttttttaatagggggaggttttagtgagtttaattggagagtgggagtgtatttttgttttatttataagaaatatttttgatataatttagtgtttgaaatggtttgaatggttttgggttatttttaatttagtagtttgtggatatgtatagagaagataaggatttagtgaaatatggagtttggtagaagatatgggaaaaataaataaatgtatgaagtgataattttttgttagtgggatttgggttttggggaaagtttttgagtatatagggtttgagattaattttgttttttttttgtagtttttgtgtgtgtttaggttgtgtttgattagtttagtttttgtttggagttaaggatttttttttatttgtttatttttggtttttttttggatttgtagtgaatttgtgtgtaaggttgaatttatagtttgaggatatttttttagtagttttttgtaatgatttaaatatagatattttatttttttgtagagtagggaggaagaaagagattgttttgtagatattttgttgtggtattttttgtttaaggttagaggatggggtttaagttttggttttttaatttattttttgtgtaattttgataagttataagattgttagtattgtttttttatttgtaaaatgggaatagttgttttgttgttataatgaaaatagattatgagtttaaaagagttttgtaaattgtaaagtgttgtattaatgttagtgatagtaggtaggatttgttgggggatttaaagtataggttttggagttagagtgtttgaatttgtataggttgttgtgagattgagtgagttaatgtatgtaaagagtttagtatattgtttggtttattgtttttgtttagtagatattggtggttattattgttgtatgtatgtatgtttttggttttttatatgttgtgtttttgttttttttgttttatttagttgtagtggtttttttttatttttatgggtggggtttttatttatttttggagttttagtaataggtttatttttttgggaattttgtttagggtggtaggttgtataaatatggggagtgttgtttatatagaaaatgtgaatggttttttttgtagttgtgttatatggtagaatagtttggtattattgtgagaaattattttttagagtttgaagtttttgtaagttatttttgtattaagatatttgggtgaatgttttattttttttattggtagagagttttttatgggtagggaaggttagtttgggttatgtttgttgttgtaataaataagtgttttttatgatgtgatgttttgtattattttggggttttgtattattagttagaaggtttttaatagatgtatgtttttagttttagattttttagtttttatagttataagaaataagttttatttttttataaattatttaattttaggtattttgatataagtaatagaaaatggatgaatatatttaggttgtg

SEQ ID NO: 4061 - DNA, 2486 bp, Artificial Sequence
  chemically treated genomic DNA (Homo sapiens)
gttaaggaatttggatatttgtagagtttagttagattgtatataatgttagttgggtgtggtggtgtatttttgtagttttagttatttaggaggttgaggtaggagaattgttttaattttagaggtagaggttgtagtgagttgagattgtattattgtattttagtttgggtaatagagtgagattttgttgtaaaaaaaaaaaaaaaaaaaaaaaaaaaaagattttatataattttaaatgatggttgtttgattattttttttttatattatggattatttttgttgttatatatttatttgttgattgtttttttttttattagaaaggataaggattttgtgttgtttattgttgtgtttttaatagttagaagagtgtttggtttatatagatatttaataaatatgtattgaatgtatgattttattggtttgtgttttttgtttattgagttattgaaagttagggatttgttggatttattattgtgtttttagggtttagtatagagtttgatgtatatgttgtttaataaatattgaaagaataaatgaatggaaaaatgttttttttaatgtgttatatatttttgtagggttgggattatttgatttatgtatttagtgtttaatatattgtttggtagaaagtagatttttaataaaggtttgttgagttagataagagttttttttgtatgtgggtttttgttaggtttgttatgggagtttaaataaaggtaattagattttatattattggattaggtagaaagagatattttgttggtaaaggattttaggattttggagttataggttgtgtaggtaggattagtttgtatgtgtagggtggttagagagattaaagagggttttttgggggttaggaattttgtttttgtttatgttttttagtattgtttttttttggtaattggtaggtagttttattaatgaggtttgggtatagttgggggtggaatgggatgggatagatggtgggagataaggaaatttttatgtttttttttatttgttatatttaattgattttttgtagaaagaaaaaaaaataaattagttgtaaggatgaaattgttaattaaaaggttttttgattagatagataaatatttattaattatgtttgattttgtttgtttttttttatgtttgtgaatttttttattagtattgtggttatattatatttagttggtggtttttttattaattatttttttggggtttagattggttgtgggtgaaatagggtagaagaaaggtgaatattgtaaatagttgtttaataaatgtgatgtttgttgtatggttaggtttagtgttgggtttttggaagttatagtagaatttttatggatagttttttaagttgtgtgttgtataaaggtgtatttgtaggagagtgggggttttttttgttaatttgggatttttggtattaggtaagggggatttttattttttttgtgtaatgggttattagtttgttaagttgaatttataggattttgtttgtttagagggggtatttttttttaatttatatagaatgggttagtggtagttttatagagatgaagatagtttagtttttgatttttaagggttttagggatagtgggggagaaaaatatgtttatgatgtataaatatttatgtgtgatttttttttttttttttttttttttttttttgaggatagggttttattgtgttatttaggttgagtgtagtggtatgattatgatttgttgtagttttgagatttttttttttttagtagttttttgaggagttgggattattggtgtgtattattatgtttggttaattttttattttttgtagagataagatttttttatgttatttaggttggttttgaatttttggatgtaagtaatttttttgttttagttttttaaagttttgggattataagtgtgagttattatgtttggtttaaatatttatttaataaatattttttgtttattggttattaatgtttgttaagtattgtattagattttgggagagagagagatgagtaatatatgttttttgttttttagaagttgggttatttgggggagatagagatatttatttgggtttgtttttttttttttttttttttttttttaattttaaataatttttatttgggaggtatgaataattgttttggatttttattatttaaattttggttttattgtgttttggttgtgtgattttgggtaagttattttatttttttttgttttaggttgtttttttgtaaattggagataatggtaattgtattttagggttattataatgattaaataaattagtatatggaatttatgtttgatatggagtgtttagtaaaggttagttattgtgtgattgttttttttttttttttgagtgtttattgtgtgttaggttttgagttttgg

SEQ ID NO: 4062 - DNA, 2486 bp, Artificial Sequence
  chemically treated genomic DNA (Homo sapiens)
ttaggatttagggtttggtatatagtaggtatttaaaaaaaaaaaagaaatagttatataatagttaatttttattgagtattttgtgttaggtatgaattttatgtgttaatttatttaattattataataattttgggatgtagttattattatttttagtttatagagaggtaatttgaggtagagagaggtgagataatttgtttaaggttatatagttaagatatggtaaagttaggatttgaatggtgagagtttagagtggttatttatattttttaggtgaagattatttggaattaaaaaagggaaggggaaaaaggaagggtagatttaggtaagtatttttgttttttttaaatagtttggtttttggagggtaggaaatatatattatttattttttttttttttagaatttagtatagtgtttggtaaatattagtggttagtaaataagaaatgtttattgaatgaatgtttaagttaggtatggtagtttatatttgtaattttaggattttgggaggttgaggtaggaggattgtttgtatttaggagtttgagattagtttgggtaatatagagagattttgtttttataaaaaatgaaaaattagttaggtatggtgatgtatattagtaattttagttttttaggaggttgttggggagagaggggttttaaggttgtagtaagttgtaattgtgttattgtatttagtttgggtgatatagtgagattttgtttttaaaaaaaaaagaaaagaaaaaagaaaaaaaattatatatgaatgtttatatattataggtatattttttttttttattatttttagagtttttgaggattaggaattgaattatttttatttttgtagagttgttattagtttattttgtgtgaattagaaaaaggtattttttttgggtaggtaaaattttgtggatttagtttggtaagttaatgatttgttgtgtaaagaaaataaaaattttttttgtttggtgttaggggttttaggttgatagggggagtttttatttttttgtaggtgtatttttgtgtagtatataatttgaaaggttgtttatggaaattttgttatggtttttaggggtttagtattaagtttgattatgtaataggtattgtgtttgttgaatggttgtttgtagtatttattttttttttattttattttatttgtagttagtttgagttttaagagagtgattggtggaagagttattagttgggtatgatgtggttatagtgttgatgggggagtttgtagatgtaaaaggggataggtagggttaggtataattggtaaatatttgtttatttaattagagggttttttaattagtaattttatttttgtaattggtttatttttttttttttttgtgggaagttaattaaatgtaatagatggaggaaaatatgggggtttttttgttttttattatttgttttattttattttatttttagttgtgtttaaattttattggtggggttgtttgttagttgttagagaagggtagtgttaggggatataaataaaggtaggatttttgatttttgggaagttttttttggtttttttggttattttatatatgtaggttgattttgtttgtatagtttatgattttagggttttaagattttttgttaataaggtatttttttttgtttgatttagtagtatagggtttggttgtttttatttgagtttttatgataggtttgataagggtttgtatgtagaagagatttttgtttagtttaataaatttttattgagggtttgttttttgttaggtaatgtgttgggtgttagatatataaattaaatagttttggttttgtgggagtgtgtaatatattggggaagatgtttttttatttatttatttttttaatatttattaaatagtatgtgtattaagttttgtgttaggttttggggatgtaatgatgaatttaataggtttttgatttttaataatttagtaagtagaggatataggttagtaaagttatgtatttaatatgtatttattgagtgtttgtgtgagttaggtatttttttggttgttggggatatagtagtgaatagtataaagtttttgttttttttagtagggggaaagataattaatagatggatgtataatggtaggggtgatttgtgatgtgaagaaaaaatagttaaatagttattatttggagttgtatggaatttttttttttttttttttttttttttttttgtgatagagttttattttgttgtttaggttggagtgtagtgatgtaattttggtttattgtaatttttgtttttggagttgaagtgatttttttgttttagttttttgagtagttgggattataggggtgtgttattatatttagttagtgttgtatgtaatttaattgagttttgtaagtatttagattttttggt

SEQ ID NO: 4063 - DNA, 2463 bp, Artificial Sequence
  chemically treated genomic DNA (Homo sapiens)
agttttgttttattttgtagatgttatatttttattttatttttttggggttttatgggtatagtgtattagttttggattggatggtaatgttttttagttttagttttatgatatttttggtattaagtgatagtaattgttgttgtagattttaggttaggagtggttttgtatgtttttgagtttaaggtgtttttgatggtattgttagtgtttttattggggtattttattttgtatatttttttgaaaggtaattttattttgtatattttgtttttggttaatttagtagttttatagttttttttgagattttgagtttgtaatgaggtttttagagattggaattttatagagtttttggttattgttttgaatttgtatttgtggatttaatttttggtgatttaaaggtaattaattttggggtggaattttatgagttggttttttaggagagaattggtagtggtagttagaggaagtgtgtgagaggttttgtttagtagggtgagtatatgttttgtttatttgaggtattgatagtggtagaaattaaaggaaaggagtagaggtagagtggtttggggtattataatgatttgtgtagttagatgtgtttggtgttgatgttagatgtgttttttttattgatgatagtggtaataatagtattgatttttttaatattattgaggtttattatgtgttaggtattgtgttaaaaatatttagtttttatggaagttttgtgatgtaggttttatttttatttttattgtatagatgaagaagatgaggtataataatttgtgtaagtttatatagttaatgtgttggagttaggttttgaattttgatagtttgattttagattattttttttttttagtatttatgttttggtgttttttgtggtatatttagaagatggtttgtatgtgtatgtgtttatttttgtgtgtgtgtatgtatgtatgtttatgtaggattgggaatgtaggggagttagagtttagttaggaaggagagaggaaatatgatttttttgttgtatgtgggtattgtaattttagttaggtaaagtgttggtttgttgtagtttatttttatgtttttatttagaagttttaatattagagttgatggtagaaaatgtgtagtaaaatgtggggaggttgttgggtaatggtttttgtaaagtgttaattgtttattgagattgtagattttgtttatgttttaggatttgaattattgataggttttaatttattttgggtttataaagtgggttttttttttaaataggtttttaattagttatgtttttttgggtttgttaagaagttttagttgataagtatgtttgttgttttaattttttgaagttggttgtgtggtttgattttggtttgttttaaggaaatttttatgtataatggttttggatgaaaatttatgagaattaagtgttgattttgtgttgggtttttagttgggtgttttatatgtattgtttttgatttttattgtttagagaagtaggtagtatttttttaaggatattttaattttagagaagttgaattaattgtttaagtgattattatgattatattttagattgttatgggttaaattgtgtttttttaaatttatgttttgaagttttagtttttagtattttggaatgtgattgtatttgaatatagggttattaaagaggtgatttagttataatgaggttttagggtgggttttgatttaattttattggtgtttttttaagaagaggaaatttggatatagataaatatagaggggtgatttattggaagatatagggagaaggtagttatttatagattaaggggagaggttttagaagaaattaattttgttgatattttaattttaaattgtaagtttttagaattataaggaaatgaatttttgttgtttaagttatttagtttgaggtattttgttatggtagtttgagtaggtgattatatatatttaggatttggtgtggttttgaatttatgtatatgattattgtaagtatgaaaattttgttttttggtttatggttttagttagaataagaagtagaaagtgggtaatattatttttttgtagtaaatttgtttttaggttgggtttttaaagggtttatgtttatttattagaaagaaaaagaaagttagatttgggattttaagtgtaaaaagaagttattgattgtttttaagtagagttagtaatataattagaatttttttttttttttggaaaaaatagttttttttggttattgtgtatagagaatggatggtagaatataaaagtgaagtaaggagattttagaggaggttgttgtattgtaggtaagagatgaaagtgatttgatggagagtggtggtaatagagaaggaaagaggtgaatagatt

SEQ ID NO: 4064 - DNA, 2463 bp, Artificial Sequence
  chemically treated genomic DNA (Homo sapiens)
aatttatttatttttttttttttttgttgttattattttttattaagttatttttattttttgtttgtagtgtaatagttttttttggggtttttttgttttatttttgtgttttattatttattttttatgtatagtagttagaggagattattttttttaaaaaaagaaagaaattttgattgtgttattgattttgtttagaaatagttaatgatttttttttgtatttagaattttaaatttagttttttttttttttttaatggataggtatgggttttttgaggatttaatttaagaataaatttattgtaaagaggtaatattgtttattttttgttttttattttaattggagttataagttagagaatagagtttttatatttatagtggttatgtgtataaatttaaggttatattaagttttgggtgtgtgtagttatttgtttgggttattataataaaatattttagattgggtggtttaagtaataggaatttatttttttataattttggaggtttgtagtttgagattaaggtgttagtaggattggttttttttgaggtttttttttttagtttgtagatggttgttttttttttgtgttttttagtgggttatttttttgtatttatttgtgtttaaattttttttttttgaaagaatattagtaagattagattagggtttattttaagattttgttgtagttgaattatttttttaatggttttatatttaaatatggttatattttaaggtattgagagttagagttttaaagtatgaatttgagggaatatagtttagtttgtaatagtttgaagtataattatagtggttatttaaataattaatttaatttttttgaggttaggatgtttttgaagagatattatttgtttttttaagtggtaaggattagagataatgtatgtaaaatatttagttgggagtttagtatggagttagtatttgatttttatggatttttatttaagattattgtgtatggaagtttttttaaggtaagttagaattagattatatgattagttttaaagggttaaggtagtaaatatatttattgattggagttttttggtaggtttagggaagtgtgattgattggaagtttgtttagaggaggagtttgttttgtgggtttgaaataaattagaatttgttaatagtttagattttggagtatggataaagtttgtagttttaataggtaattaatattttataggggttattatttagtggtttttttgtattttattgtatattttttgttattagttttggtattgaagtttttaaataaaaatataaaaatgagttataatagattagtattttgtttggttggagttatggtgtttatatgtaataaagagattatatttttttttttttttttaattggattttaatttttttgtatttttagttttgtataaatatgtatgtatgtatatatatagaaatgagtatatgtatatgtaggttattttttgagtgtgttataggaggtattagagtatggatattgggaggaagaggtggtttggagttagattgttggagtttaaagtttgattttggtatattaattgtgtgggtttgtataaattgttatgttttattttttttatttgtataatgggagtaagaatagagtttatattataagatttttataaagattaggtgtttttagtataatatttggtatataatagattttaataatgttaaagggattagtattgttgttgttattattattaatgggaggagtatgtttagtattaatattgagtatatttaattgtatggattattgtaatgttttaagttattttgtttttgttttttttttttggtttttgttattgttagtgttttgaatgagtaaggtatatgtttattttgttgaatagagttttttatatattttttttagttgttattgttaatttttttttaggaagttaatttatgaagttttattttaaagttgattgtttttggattattaggagttaaatttataggtgtaaatttaaagtaataattaggaattttgtgaggttttagtttttgggaattttattgtaaatttaaggttttagagaagattgtggggttattggattggttagaagtaggatatataggataaaattgttttttaggaggatatgtaggataaaatgttttagtgaggatattggtagtattattaggagtattttgggtttaggagtatgtaaggttatttttgatttgaagtttgtagtaataattgttgttatttgatgttaaggatattatggagttagagttagaggatattattatttagtttagagttggtgtattgtgtttatggagttttaagaaggtgggatgggggtgtagtatttgtaaggtagagtaggatt

SEQ ID NO: 4065 - DNA, 2461 bp, Artificial Sequence
  chemically treated genomic DNA (Homo sapiens)
tattattgaggataattgttttttgagttatatttttattattaggtgttatattatagtaatgttttatattatattattttattttatttttgtgaggtagggtttttgttgtttaggttggagtgtagtagtatgaatatagtttattgtagtttttattttttgggtttaagtagtttttttattttagttttttaagtagttgagattataggtgtgtgttattatttttggttaaattttttaattttttgtatagataaggttttattatgttgttttggttggttttgaatttttgggtttaagggattttttttttttggttttttaaagtgttgggattataggtatgaattattatgtttggttttattgtagtattttaaatttagattggaaaattagtaattaaaagtgttaaatatagaattattaaatagatggattaaagatatattaagtttttggtaagaataatagttttggattgataatttttgagttaaaggatagttgtgtttttagaatgagagtataattagataattgattggtttatttttttttttttggttggtgttgtattttggttgtaaatatgtatgaagtgtgtgtatgtgaatgtgggattggagggaaattatgagtatttaattaggtatgtttatatgtgatttgtgtgtttatgtgtgtgtgtgtgtgtttgtgtgtgtgtatgtatgtgtttgtgtgtttttgtgtttttatatatgggtttgtgtgtatatgtgtgtgtgtttgtgtatatttgtgtgtatgtgtgttgtgtgtttgaaggtaaattttaagaaggtaggggttatgtatttagtatagttattggtatagaataaatatttattatttgttaaatgaatgaatgaatgtgtatgtgtgtttgtgtgtgtgtgtgtgtatgtatgtttatatgtgagtgtgggtgtttgggtttttgagagtggggttattaatgtttgagtgggtgtgagggttttatatttgattatgtgtttaggtttttgtaagtttagaatttgattatgtagagataatgaatttttttgtatttttttgatttttatttgtgtttttatttattttttttagggttttttttgtttggggagttattttttttattagtttgtagttagtttttatttggatttttatttttgtgtgttttttggaggatatagatggtaggagtatggaattggaagtatttggtaatgaagtagtaatttattttgtaatttttttgtatttattgtaataatgtttgttttgatgggttttgtgtgttgaatgtagtttttaatgtgtaatttagtgggaattgtggtgttttgtggtttttattatgtttatttattgttaagtgttgttgagaatttttttatttgggatgagggaattatttgttttagtaattgatttttgaaattttttttgggttggggtatttgtgaagtttttggtgatgtgttattgtttttggtttgtgttttggatatttatgtgttttgttgaagtatgtaaattgttataatgtgaggaaatgtgatataaaaataattttggggtaataaatattagaggagttttaagattggtatagttttttttggttttgttttggggttagggagtattttttgttggtagtgttggtagtaaaggtttgagatgttttggaatgattattgtttatttttttgtagttgtttagttggtttgttggagaagggtgggtgagattttttttaggaaggtaggaatagttggatgtggattgttttttttttttgtagttggttaatagaattataggttttgttttggttaaagggaatttgttatttttgattatttaggtggttgtatatatttaggggtaaatttatatttattgttggttgtttatagtttgtttattttgttagtagggggttgttttttaggattttaggttaggtggttttagttgggatttattgggaagtattgatggggagtggaggatagtggaggggaggatggagataggaggagttgggaaagtttttgttttttttttttttttgatttagataatgtttttaggagtagttggttttttttgtggatttagattttaaaggtgattttttgtggttttagtttttggtagaagatttttgtttttggttattttattttttttttgattttttggtttagtggtggtggtgattttttgttgttgtttatttttgggttgatttattggtttttgtttggttttttagtttttttattatttatgtgatagatttttggtattgaagtttttttgttttaagtgtttagtagttttttttttttgtttagattttgatattttattaaggatgttttggattattagatttttttttatggtttgttgaggaaa

SEQ ID NO: 4066 - DNA, 2461 bp, Artificial Sequence
  chemically treated genomic DNA (Homo sapiens)
tttttttgataggttatggaggaagatttggtagtttaagatgtttttgatgaagtattagagtttaaataagaaaaagaaattattgaatatttaaaatagagggattttgatgttaggaatttgttatatgggtaatggaagagttgagaggttaaataagggttagtgagttaatttagagataaataatagtaggagattattattattgttaggttagagggttagaggagagatgggatgattaggagtaagggttttttgttagaagttaagattataggaggttatttttagggtttggatttatagaggagattagttgtttttgaagatattatttgagttagagaggagagggaaatagagatttttttagttttttttgtttttatttttttttttgttgttttttattttttattaatgttttttagtggattttagttgaagttatttgatttgggattttgggaaatagttttttgttggtaagatgaatgggttgtgggtggttaataatgaatgtgaatttgtttttgagtgtgtgtagttatttgaatagttaggggtggtagattttttttagttagagtaaagtttgtggttttgttgattagttgtgaaaaaaggagatggtttatatttagttgtttttgtttttttaggaggggttttatttgtttttttttagtaggttagttgggtagttgtaggaggatgggtagtggttattttagggtattttaggtttttgttgttaatattgttggtaagagatgttttttagttttaaggtaggattaggaaaggttgtgttaattttggagtttttttggtgtttgttgttttggagttatttttatattatatttttttatattatggtaatttatatattttagtagagtatatgagtgtttaaaatataaattaggaataataatatattattaggagttttgtagatattttaatttagagaaggttttggaaattagttgttaaaataagtggtttttttattttgagtgggagaatttttagtaatatttgataataagtggatgtgatgaggattataaagtattataatttttgttggattgtatattgaaagttgtatttagtgtgtggagtttattagagtaggtattgttgtgatgaatatgaagggattgtggaatgaattgttgttttattgttaagtgtttttgattttgtgtttttgttatttgtgttttttggaagatatatagaagtaaaggtttaaatgggggttggttataggttggtgaggagggtagttttttaggtaaggggagttttaaggaagatgagtgggagtataggtaggggttagaggagtgtaagaaaatttattgtttttgtatggttaagttttagatttatagaaatttaaatatataattagatgtaggatttttatatttatttaagtattaataattttatttttagaaatttaaatatttgtatttatatatggatatgtatgtatatatatatatatagatatgtatatatatttatttatttatttaataaatagtgagtgtttattttgtattagtgattatgttaagtatatggtttttgtttttttggagtttatttttagatatataatatatatatatatagatatatataggtatatatatatatatatatagatttatatgtagaaatatagagatatgtagatatatgtatgtatatatatagatatatatgtatatatataagtatataggttatatataaatatgtttaattagatatttatggtttttttttagttttatatttatatgtatatattttgtgtatatttataattaaaatgtaatattagttagagggaagaggatgaattaattaattatttagttgtgtttttattttgaaaatatggttgttttttaatttagaggttgttagtttaagattgttgtttttattaagagtttgatatgtttttagtttatttatttgatagttttatatttaatatttttaattgttaattttttaatttaggtttaaaatattgtagtaaggttaggtatgatgatttatgtttgtaattttaatattttgggaggttaaggggagaggattttttgagtttaggagtttaagattagttagggtaatatagtgagattttgtttgtataaaaaattaaaaaatttagttaagggtggtggtatatatttgtggttttagttatttgggaggttgaggtgggaggattgtttgggtttagaaagtggaggttatagtgagttgtgtttatattgttgtattttagtttgggtagtagagattttgttttataaaaataaaataaaatgatataatataaaatattgttgtgatatggtatttggtaatggaaatatagtttagagagtaattatttttgatggta

SEQ ID NO: 4067 - DNA, 2495 bp, Artificial Sequence
  chemically treated genomic DNA (Homo sapiens)
attatgttagaagggttagaaaattttgaaagtaattattagtttagtagaagttgtaagaggtttttatattatgaatagtttaattttgataaatagaatttgtttatttagtgattttaaatgtatttaatgatgttatgatagtagtggttataatagtattagtttttgatagtagtgtggatataggttttgagaattttatataatagttgattagataatgtgatattggtgtgaggatgtgtgatttagattattgttttagagtgatttagagttggttgtgaaattgtaaggaggtattaaggggtaggtattttagattttgagttatgtggaaagtgttgagttatatggaaagtgttgatatttaggggtgggtttgggtgtattatgaggttagtatttagttgttttttggatgtaataaagtttggatattaataatttaatgatttttgattttatgggagttagtggatttgttttatattatttttatgttaaattatggtttatataaggatgttatttagttagagatttatatttgaaaaaagattattttggaaatttttaaaaattaatatgtgatttggaaattgttttaatgttttataaatgttgaatattatgatttgtatgaatgattatgatgtttagttagtagagtattaaaaattttatttatgtttttgttagtgttgtaattttattaatattttttattattatggtaatgttttttaaagttgtttaagatttataataagttgtaaaaatagtgtaaaatttttgtgtattttttatttatttttttttattaataatattatatataattatagtatagtgttaaaatgaggaaattaatatagtattatattgttaatttgattatagaatttgtttagattttattaggatttatgtgtatttttgtgtgtatatgtatgtgtgtgtgtgtggtttatttttatttttaaggattgtttttttttataatttttatgttaaggttatggagttttagttattgttaggtagaggtggagttatatatgattgtgtttttatataattatattttttttatttaagaatatttattttatatggagaaatagattatgtttattaattattttagaaagtatgtaattttattagattaagttttgtttttgggtattgattaatagagggaatggttttttagtgatttagaatttttatgatatggtttgtggagattatattttggggttagttgtttaaatgtattgttggaattttaggtagaaatgtgtaatggtatgttaagggttgttgagttgttatagtttaagtagggttatttgtggtttttaaagagaggttgtaattttttatggtatttataaattttagtttttaagagttagggagaaaatgtaattatgttgtttgattgagttaattttttttttattttgttttttttttatttttattattattttatttttaattttgagtagtttgtatagttgttttagggtaaagaatatggtatgagatattatttttagtattattttagggttagataaaatggttaggtattttttttgatttaatgagggaaagttttagaaagttgttgataaagtagaaattttttaatttgaggttttgaatatttattgttttttttgagtaagatagaaaagttttatttattggttggggtatttttaatggtagttgtaggttagggatagttatgtttatatatgtatttttttattattgattaggtttattagaatgttagagttaaagaatattttttttttgttttgtaggtatatggagaagggttttttgttgttttttttgatataaatatagtgtttgaagtattttttttggtaatttttttgatttatttgtatgtgtatttatttattttatttattaggagagttaaatgagtgaaatggttataaatggtggttttggaattagatagatttgggttttaatattatttttaatatttattggttgtgtggtttttatattaggatagaaagtttatatgttgaatttttaatttttagtatttagaatgtgattttatttggagatagggtttttatagttgtgttttttatagttgtttttaagaatatttaagattggtgtttttaggaaggggtgatattggagataggtatatataggaagaatattataataatgtgaatttagagattggggtaatgtttttataagttaaggaatgttaaagattgtttaaaaattattggaagttaggaaagaggtttagaatagattttttttttattatttttatatggtgttaagttttttgattttgattttggatttttagtttttaggattgtgagaaaataaatttttgttgtttaagttattatttagtatgtggttttttgttatagtagttttagtaagttaat

SEQ ID NO: 4068 - DNA, 2495 bp, Artificial Sequence
  chemically treated genomic DNA (Homo sapiens)
attggtttgttaggattgttgtaataaagaattatatattaagtggtgatttaaataatagaaatttatttttttatagttttggaggttagaagtttaagattaaggttagagggtttggtattatgtgagggtagtaaggggaagatttgttttgggttttttttttagtttttagtgatttttggataatttttggtattttttggtttgtaaaagtattgttttaatttttgagtttgtgttattatggtgttttttttatatgtatttgtttttaatgttatttttttttaaggatattaattttaggtgtttttaggaataattgtaaagggtataattgtaaagattttatttttaaataaagttatattttaagtattggggattagaagtttaatatgtgaattttttattttaatatgaaggttatatagttaataagtgttagaggtagtattgaaatttaagtttgtttgattttagagttattatttgtaattattttatttatttgatttttttggtgaatgaaataagtgaatatatatataagtggattagagaagttgttagaaaagatattttaagtattgtgtttatgttaaaagggataataggaaatttttttttatgtgtttgtaaagtaaaggagagatattttttagttttggtattttaatgggtttgattaatgataagagagtatatgtgtagatatgattgtttttggtttatagttgttattaaaagtattttagttaataagtaaaatttttttgttttgtttagaaagaataatgaatgtttaggattttaaattagaaagtttttattttgttaataattttttgggatttttttttattgaattagaagggatgtttggttattttatttggttttgaggtaatgttaaaggtaatgttttatgttatgttttttgttttgggatagttatgtagattatttagggttgggggtagagtgatggtgggagtgggagaggggtaaggtggggaaagagttagtttggttaaatagtatggttgtattttttttttgatttttgaaggttgagatttgtggatattataaaaggttatagtttttttttggaagttataaataattttgtttggattatgatagtttagtagtttttggtatgttattatatatttttgtttggaattttagtagtgtatttgagtagttggttttaaagtatggtttttatagattgtgttgtaggggttttgggttgttggggagttgttttttttattagttaatgtttagagatagagtttgatttaatgaaattatatattttttggagtgattaataaatatggtttatttttttatatgggatgaatatttttaaatgaaaggaatgtgattatgtgggggtgtagttatgtatagttttatttttgtttagtaatggttaaaattttatgattttggtatagagattgtaaggaaagatagtttttaaaaatagaggtaaattatatatatatgtatatatgtatgtataagagtatatgtaagttttggtaaaatttggataaattttgtaattaagttaatagtatgatattatgttaatttttttattttgatattgtattgtggttatgtgtgatattattaatggaggaaggtgagtaaagggtatataggaattttgtattatttttgtaatttattatgagttttaaataattttaaaaagtattgttatagtaataaaaagtattagtgaaattataatattgataaaagtataggtagaatttttagtattttattaattgaatattataattatttatatgagttatgatgtttaatgtttatgaaatattagaataatttttaaattatatgttaatttttaaaaatttttggagtggtttttttttggatatgggtttttaattaaatgatgtttttatgtgagttatggtttgatatagaaatggtgtaaagtaggtttattgatttttatgaagttaagaattattaggttattgatgtttaggttttattgtatttagagggtagttgagtattgattttgtggtatatttaggtttatttttggatgttagtattttttatatgatttaatattttttatatgatttaggatttggagtgtttgttttttgatgtttttttgtaattttatagttaattttgggttattttaaagtagtggtttgggttatatatttttatattaatgttatattatttagttagttgttgtatggggtttttagaatttgtgtttatattgttgttaggaattgatattgttgtggttattattgttatgatattattagatatatttaggattattaaatagataagttttatttattaaaattaggttatttatggtgtagaagttttttgtagtttttgttgaattaataattatttttaaagttttttaatttttttaatatggt

SEQ ID NO: 4069 - DNA, 2425 bp, Artificial Sequence
  chemically treated genomic DNA (Homo sapiens)
atgtattttgagtgatttaggaaaattgtttttttttttttttttttaatttttaagtatttaaattaagttttttttttttgtaatgttttatttttggtgtttatgggagttgagaatatattattggagaatttttttagtttaaagatattagattaataaaataatttggatgttaattttgaagttagtttataataattagggtttttggtttaggtttataatgagtaggagatttttgttatttttagtgttatttttttgtaaaattttaataagttattttatgtgaaaatattaattattgtttattgtagtgtttaaaattagttaaggaagtttttttgaaggtggtgatgtaggggtttatataagggattagttgatggaaaggagaaagatgtgtgttttagagagaagaaataagttgggtagttttgtaaatggtttatgtttatgtggagatatgttaggttagagtaggtttgtgtgggagagaagttgtggttaggggtatggaattggatagagattaaaaatatgggttttagaaagttaaattggaggatttttattttgtaattttatttttttttttttttttttttttgaaattaattggatttattttttattttttttatgggagattttatagttattatttttatttttttaatagttttgggaggtataattatttttatttattagttaaggaaattaaggtttaggagggtttattgataggagtgggagtagtttgggtttatgttatgtgtttttatagttagtatatagttttatttgttttattttgtatttgttgtgttttattgtatttagattgtagttagttttttttttgtttttttgaattttagtataggtaggtattgtatttatttatttttatagatggtaaattgaggtttagagatgttaaattatttttttaatgttatattgttaggaagttgttaatatattattaaatttggggatatttgttttttagggtagtattttgttgttttttaatatttagtagttgtgattgttagatgatgatgatgattattaatagagttattgtttttggggtaatattagtagtgtagtagtgagtaggttagtagggtttagggtagtttgtttggttatatttgttttggagttgttgtttgttgtgtattaggaatttgttgaagtttgagagttgttagtatagattttattagggagttagtaatgttttttatttttttaggtttttttgaaatttagttaaggaataggtgttgagtttatagttagatagtttttggagtttttggttttgggtatggtgttttagttggtggagatggaaatagtaaggtttttttgatttaaagattttttattgtttttgatattttagatttaaaatttattattattgttatttagtatttattttgttaggtatgatgtagggagagaggaggggataaaaaagggaagggttgtatagagttagggtagagggaggaattgagttggagaaagtattaaggatttatttgtgaaaattttttggagtgttgaggttaaaagtttatttgggtgggattaaaggggagtttttaatatagtttatgattggaggattagtaatttgtaggtttagttaggttttgattttttttttttttagtttttgaggagaattatagttattgtttgagaaaatgtagttttaggatataggattttaatttagtgtttgtatagttttttaattagaggtttgtaaatggtagagttgtttatttggattattttgtaaattgtgaggttaaattgtattaataaaaaaaagtattttttttttaatttttttttttttttagttttttattagattgggatgagatgtagaaatgtattagattgggaaatatatttaattttttgttaagtttttttttaaataataagtttaatttttggtaggtaagggtgttttggtaaaatttaaatagaattgtttagtttttattatatttattttgatagtgaattttttagaataggaagtattttttgtttaaagtttttgtttagattttatatatgaagtttttaaaagtaaaaggaaattatagtttagttttttgtagatattttgaatattttgaggagaggtagggataattggaggtagggaaatggggttttggatgataagttttagttttgggaaagttttggaggtggtaggatagttaggttagagttgtttggtggagatttggtttttgaagttagtggggtatttttgagtagtaggttttttttagagtaaatattagttttttttttttttgtttttaatgattatagttgggtaggggggagaggttttaatttttaa

SEQ ID NO: 4070 - DNA, 2425 bp, Artificial Sequence
  chemically treated genomic DNA (Homo sapiens)
ttgggagttaaagttttttttttttatttagttgtggttattaaggataaagaggagagagattgatgtttgttttgagaaaggtttgttgtttaggggtgttttgttggttttaggagttaagtttttattggataattttggtttggttgttttgttatttttagaatttttttagagttgaggtttgttatttgagattttgtttttttatttttggttgtttttgtttttttttaagatgtttagagtatttgtaaagggttgagttgtgatttttttttgtttttaaaaattttatgtataggatttaaatagaaattttagataagaaatattttttattttaaaggatttattgttaaaatgagtataatggaaattaggtaattttatttaggttttattaagatatttttgtttattagagattgggtttgttgtttaaaagggagtttagtaaaggattaggtgtgttttttaatttgatgtatttttgtattttattttaatttgatgagaaattgaaagagaaagagaattaaaaggggaatgtttttttttattaatgtaatttgattttataatttgtagaatgatttagatggatgattttattatttgtaggtttttggttggaaggttgtgtaggtattgaattagaattttgtgttttgaggttgtatttttttaggtagtgattgtagttttttttaaaagttgagaaaaagggaaattaaggtttaattaggtttgtaagttgttgattttttagttatgggttgtgttgggggtttttttttgattttatttagatgggtttttagttttagtattttaaaggatttttataagtgggtttttaatgttttttttagtttggtttttttttttgttttggttttgtatggttttttttttttttatttttttttttttttttgtattatgtttggtagggtggatgttgaatgatagtgatggtgggttttaagtttgaggtgttaggggtaatgaggagtttttgagttagaagggttttgttgtttttatttttattagttagggtattgtgtttagggttggaggttttgggagttatttgattgtgagtttagtgtttgttttttggttggattttagagaggtttgaggaagtgaggggtgttgttggttttttggtggaatttgtgttgatagtttttaggttttggtgggtttttggtgtatagtagatagtagttttagggtagatgtggttgagtaagttgttttgggttttgttagtttgtttgttgttgtattgttagtgttgttttaaaagtaataattttattaataattattattattatttaataattatagttattgggtattgggaggtaatggagtgttgttttgaagagtagatgtttttaggtttagtaatgtgttggtgattttttagtaatgtgatattggaggagtggtttaatatttttgagttttggtttgttatttataagaatgggtaagtgtagtatttatttgtgttgaaatttaaagagatagagagaaagttggttgtaatttaaatgtagtaagatatagtaggtgtaggataggatagatgaagttatgtgttgattatgaagatatgtgatatgagtttaagttgtttttgtttttgttagtgaatttttttaagttttagtttttttagttagtaaatggggataattatattttttaaagttattgagaaaatggaaataatagttgtgaaattttttatgaggagaataagaaataagtttggttaattttgaagaaaaaaagagaggaaagggtggagttgtaggatgaaagttttttaatttgattttttaggatttatgtttttggtttttgtttaattttatgtttttaattataattttttttttatatagatttgttttaatttggtgtgtttttatatgggtataaattatttgtaaaattatttagtttgttttttttttttggaatgtgtattttttttttttttattagttgattttttatataaatttttatgttattatttttaaagaggtttttttgattgattttgaatgttgtaatgagtagtgattaatatttttatataaaatagtttgttgaggttttataaagaggtagtattggaggtggtagaggttttttgtttattgtgaatttgagttagaagttttgattattgtaggttggttttagggttaatatttagattgttttgttgatttggtgtttttgaattgaggaaattttttaatggtgtgtttttaatttttatgaatattagagataaaatgttgtaagaggaggaggtttagtttaggtatttagagattgaggagaagagaaagaaggtaatttttttggattatttaggatgtat

SEQ ID NO: 4071 - DNA, 2488 bp, Artificial Sequence
  chemically treated genomic DNA (Homo sapiens)
tttttttttttttgagatggagttttgtttttgttgtttaggttagagtgtaatggtgtgattttggtttattgtaatttttgttttttgagtttaagtgatttttttgttttagttttttatgtagttgagattataggtatgaattattattatatttggttaattttgtatttttagtagagattgggtttttttttgttggttaggttggtttggaattttagattttaggtgatttttttgttttttttttttagagtgttgggattataagtgtgagttattgtgtttggttgaattattggttttttttaagtagtggaataataatggtttataatatttagaagatggggttatatatttattagatttatttttttagagtttattttagtatttgatatagggtagattttaataattgttgttaattaataaatatatatttttaaatatattgttagtaatgtggaagatatattgaagaaggaaaagattagtggtaagatataagttaggtggtaaaatttaaaagaaaagttagtgatagaaaagaagtttgttgagaatgatggtttttagttttatttatgttttatgtatatatatgtaataaattagtatattgtgtatatgtagtttagaatttaaagtataataaataaatatgtgtgtgtgtgtatatatatatatatatatatatatatataaagaagttgatatgggagagatatttgaggtagaattgataggttttggagatagtatgattgtgtggttttagagagagatattagttgagaataatttttaaaatttttatttgtgtgtgattttttatgggggatatagaagggggagtttagttggggattttgagttttagttgtttttggaatatgattgtatagattgtggtttgaaaggaagtggtagagaagaaaaatttaaaatggttgttaatagtttgttttttggaggttttagagttttgggggttatggatgtatggttatgtagggtgagtaattgtgatgagagaatagaaaggaaatttaaataagagaatttaaagtagagatgagttaaaaattagtaatatgaattattataagtgggtagttatgtttggtaggagatttaggtaaagtgagggtaaattttttagtttttttttgtggaaaatttataaagtttagattggagaaaatgtattgatagttttgaagttggtattttaagttggaatgtttttttaaagtagtatataatggtataatttaataattttgattattgtggaaaaatgttatgtgttaatagtgattttttataattttgtttagaaaatttgaaagaaatgtaaaaaatggatttgtagttttggtagtaggtagagaaatagtagtagagggttgtaggttagtaattgatgttttaaatattattgagtgttttgtttgtaattttaggggagaatgataataattaaaagtataaatttataagttatttttgaggaggaaaatgttgaatgtatttaaagtgaagggggtttgttgaaatgtttaagtttttttagtgagtttttagatatgtaatgattagttttatgtttatagagtgattttttttttaaatgttttaaagtgttataaaatggaatagattattaatttatgagattttttgggagttagtgatgaaattataattatatgatatttttatatgtttagattttatttgattgtattggtttttgttataaatagtatagtatattgtttaaaaggatgaaatgaaatttttttttttttttttaattgatttggggttttattatgaggtagatttgagtttgagtttgtatttattttttttagtgttgtgattttaggtaggttattttatttttttttatttttatttttttatttgaaaaatagatagaataatagtatttaatattttatagggtgaatattgaggattatttgagagtaaaataattaatataattttttatttataatttatgtttaataaatattagttattattgatattattattattgttaaaatgataaaggtatattatttttataattatttatttttgttgatagaatgtaaatttggttatagattgtttaaatttttttgatattttaaaataaataaataaataaattagttagagatttaattgagtagtataatttttttttgaaaggaattttttatggttaaataaatttagggattgagttttttatattttagattttattatttattgtattataggttttggtatgtagtgagtattttataaatgtggagtatatatattgttgaatgggtaaatagttttattttttttgagaagtaaggatttttggttttttattattttttgatgattaatattatgtttgtgtttatataagttagttgtgatatttggatttttttta

SEQ ID NO: 4072 - DNA, 2488 bp, Artificial Sequence
  chemically treated genomic DNA (Homo sapiens)
tgaaaaaaatttagatgttatagttaatttgtgtgggtataagtataatattagttattagaaagtggtgagggattagaggtttttattttttaggagggataaaattgtttatttatttagtaatatatgtgttttatatttatagagtgtttattgtatgttagggtttgtaatataatgggtaatagggtttgggatatggaaaatttagtttttgaatttgtttaattatgggggattttttttaggaaagggttatgttgtttagttgaatttttggttggtttgtttgtttgtttgttttaaaatattaggaaaatttagataatttgtggttaaatttatattttgttagtaaaaataaataattataaaaatagtgtgtttttgttattttagtagtaataataatattaataatagttaatatttattgagtgtagattataagtgggaaattatattgattgttttatttttaggtaatttttaatatttattttatgagatgttaagtgttattgttttatttattttttagatgaaaaaatggaagtggagaggaatagagtgatttgtttaaggttatagtattaaaaagggtggatgtagatttaagtttaaatttgttttgtagtaaagttttaagttagttgggagaaggaggaaaggttttattttatttttttaaatagtgtattgtgttgtttgtaataaaggttggtataattaagtaaggtttgaatatgtgggaatgttatatggttatagttttattattggtttttagggaattttatgggttaataatttattttattttgtggtattttggaatatttgaggagaaagttattttgtgaatataaaattaattattgtatatttgaaagtttgttggaaaaatttaagtattttaataaattttttttattttaagtgtatttagtatttttttttttagaaatgatttgtaagtttgtgtttttaattattattatttttttttgaaattataggtaaagtatttagtgatatttgaaatattaattattggtttgtagttttttgttattgtttttttgtttgttgttagggttgtaaatttattttttgtattttttttagattttttgaataaaattatggaaaattgttgttggtatatggtatttttttataatggttagagttattgaattgtgttgttatgtgttattttgagaagatattttaatttaaaatgttagttttaaaattattagtatgttttttttaatttgagttttataaattttttataggaaaaggttaagaagtttgtttttgttttgtttggattttttgttgagtgtaattatttatttgtgatggtttgtgttgttgatttttagtttatttttgttttgagtttttttatttggattttttttttgtttttttattataattgtttattttgtgtggttatgtatttatggtttttggaattttgaggtttttagagggtaaattattggtagttattttgaattttttttttttgttatttttttttaggttgtgatttgtgtagttatgttttaaaggtaattggaatttaaaatttttgattagatttttttttttgtattttttatggaggattatatataaataggaattttgggagttgtttttaattagtgtttttttttgagattatatagttatgttgtttttaagatttgttaattttattttaaatgttttttttatattaatttttttgtgtgtgtgtgtgtgtatatatatatatatatatatatatatatttatttattatattttaagttttaggttatatgtgtataatgtattggtttgttatatatgtatatatgggatatggatgaagttggaaattattatttttagtaaattttttttttattattgattttttttttagattttattatttggtttatattttgttattagttttttttttttttagtgtattttttatattgttgataatgtatttaaaaatatatatttattagttgataatagttattaaaatttattttgtattagatattgaaataggttttagggaaatagatttggtgagtgtataattttattttttaaatgttatgaattattgttattttattgtttagaaagagttaatggtttggttaggtgtggtggtttatgtttgtaattttagtattttgggaggaggaggtgggaggattatttgaggtttggagttttagattaatttaattaatagggagaaatttagtttttattaaaaatataaaattagttgggtgtggtggtggtttatgtttgtaattttagttatgtgggaggttgaggtaggagaattatttgaatttgggaggtggaggttgtagtgagttgagattgtgttattgtattttagtttgggtgataagagtgaaattttgttttaaaaagaaaaaag

SEQ ID NO: 4073 - DNA, 2378 bp, Artificial Sequence
  chemically treated genomic DNA (Homo sapiens)
ttgaagttatagtttaggttttgatttttattggtagtgaaattttattttgatttttgtgttttttattttgtaaaatgaaggtgggaatagtttgttgagtgattgttgtggggattagatgatatttgtggaagaattttgtaaggggtaaagaggtattattttataaggtaatgttattatttttaaggtggggtaagtgatagttagatatttaagttagagtaaagttaggagaaggttgtattggtatggaaaggggtaaatagtttatttttattagtttttttggagggttaattttaaagttattagagttttaagttttgggtaaaaaatgtttgtttttagagtaattttttatttttttagagttattatgtttaaggtgttttgttttgtttgtttgttttggttttggtttttgttttattttgtttttttgagatagagttttgttttgttatttaggttggagtgtagtggtgtaattttggtttattgtaagttttgttttttgggtttatattatttttttgttttagttatttgagtagttgggattataggtgtttattattatgtttggttaatttttttgtatttttttagtagagatggagttttattatgttggttaggatggttttaattttttgaatttgtggtgtttttattttgaaaaagggaaaaatatgttttatgttttgaggtttaattataaaatatttttattttttaagtttgattaggagttatttgttttagaatgatttggagtgttgtttaaatgtagatttttaggttttatttttgattattatttaatttttttgagttttagtttttgagttttgaggtgtgatgtaatttttgttttaaattttagtaagagagttttaatagaaaaaaatgaataaatgaaaagatgaatggtttgtaagggagaggtagaatatgtatttagataagatgatttttattgttttatttaaattagatttttattattttaggtttttaaagatgtttttagttttaaataattaatagagtggttttatttttatttattgtgtattttggttaagtgtatagtaagtggattttttggttgggtattttgttaatgttggagttgttaggaaataagaatgtgtgtatttattgaagaaaataaaaatgtttatgtgatgttgtatagagatgatttatgagattttatgaatgtgttattaaaagatttatttagttattgttaatgttaggtttgtaaatatttgggggtttaggtaataaagttttttgatggagttagtgggtaggatgtgtttgtggaggggagtatgagttttgtgttgtaggtgtttgtatttgtgagttgtgtggagttaagtatatttaaattataagtgtatatatgggtgtaaataaatgtatatatattagtggtgtgtaagggagtatgtatatatgtggattttatgagattgtatagtatgggttatttttggtgtgattaggaagagaggttaagttatagtgtagaagtggatttattatttatattatttttaaaggatatagagtttttgttgtttaaaggaaggggttagttattatttattgttaagattaaaagttttggggtattaagaaaagtagattattaagagaaaaatgtttttagttgagtatgtaagaatggatagagtttgattaataggaggaagagtagggttttattttgtttattttttttgttgggtttgaattttttattgatattatagtttattagttttaggtttttgaagtttttttgagttttgtgaattaggtttatgttttattgtttttttgggagtattgttttgtgttttttagttgttaggttggtgtaaattatagaatgaataagtttttttattaagttttttggagtttagagtagtttattgttttttgagggttattttttatgggagaaagtttaagaaaatgtatagaaggtatgttattaaaagaaaagggaagaggaagagaaaaggaggaaggagaaggaggagaaggaaaaggaaagtaagaaagaagtgtttttagggtgagtttttgaattatttagagtttatttttataaaaatagttttaagattttttgtgggttatgtaagaaggaggggtgtttatttttttttttttttttatttttttgtaataaggagagaattataggttttgtaagagttttttgtttgtttggggtatgttattattatatgtatttttttaggtatgtgagggaggttatttttttatgagatagggaggaattttgggtaattgtggtttggaaatgaaattagtttttttaa

SEQ ID NO: 4074 - DNA, 2378 bp, Artificial Sequence
  chemically treated genomic DNA (Homo sapiens)
ttgaaagggttggttttatttttaagttatagttgtttagggtttttttttgttttgtagggaagtgattttttttatgtgtttgagaagatgtatgtgatgatggtgtgttttaggtaaataaagggtttttgtaaaatttatgattttttttttgttgtagaggaatgaaagggagggaggaagtaggtattttttttttttgtatggtttataaggggttttaaggttatttttatgaagatggattttgggtgatttagggatttattttaaaagtattttttttttgtttttttttttttttttttttttttttttttttttttttttttttttttttttttttttttaataatatattttttatgtatttttttgaatttttttttatagaaggtaatttttagaaaatagtgaattattttaggttttaaggggtttagtaggagagtttgtttattttgtggtttgtattagtttggtagttggagagtataagataatgtttttaggagggtggtaaggtataaatttggtttatagaatttagagaggttttagagatttggaattaataggttataatgttaatgagaagtttaggtttagtagaggaggtgagtaagatgggattttgtttttttttttattggttagattttatttatttttgtatgtttggttagagatattttttttttgataatttgttttttttgatgttttaaggtttttggttttagtagtaggtgatgattaatttttttttttgagtagtgagaattttgtgttttttgaaggtagtgtgagtaatgggtttatttttgtattgtggtttagtttttttttttagttatattaggagtggtttatgttatgtgattttatggggtttatatatatgtatatttttttgtatattattagtgtgtgtatatttatttatatttatatatatatttatgatttaagtgtatttggttttatataatttataggtgtaggtatttgtagtatagggtttatatttttttttataagtatgttttgtttattgattttattagggagttttgttgtttgagtttttaggtgtttgtagatttaatattggtagtgattgagtgggttttttggtgatatatttataaaattttataaattgtttttgtgtaatgttgtatgaatatttttattttttttaataaatatatatatttttattttttaatagttttagtattggtagaatgtttggttaagaggtttatttattgtgtatttggttaggatgtatagtggataggaatggggttattttgttggttgtttgagattgaagatatttttggggatttgggataatggaggtttgatttggatgggataataggagttattttgtttggatatatattttattttttttttgtaagttatttatttttttatttgtttatttttttttattgaaatttttttattgaggtttaaagtaaaagttatgttatgttttaaaatttaaaaattgaggtttagaaaaattaagtgatagttaaggatggggtttgaggatttgtatttgaatgatattttaggttattttgaggtaagtggtttttggttagatttgaagagtgaaggtattttgtgattagattttagggtataaaatgtattttttttttttttaaaataaaaatattatgagtttaggagattgagattattttggttaatatggtggaattttgtttttattaaaaaaatataaaaaaattagttgagtgtggtggtgggtgtttgtagttttagttatttgggtggttgaggtaggagaatggtgtgaatttgggaggtagagtttgtagtgagttgagattgtattattgtattttagtttgggtgatagagtaagattttgttttagaaaaataaaatgaagtaaaaattaaaattaaaataaataaatagaataaaatattttggatataataattttgaagaagtgaggagttattttaaggataaatattttttatttaaaatttaaaattttaataattttggagttgattttttagagaggttggtggaggtgggttatttatttttttttatgttagtgtaatttttttttggttttgttttaatttgagtgtttgattgttatttgttttattttaaaaatgatgatattattttataaggtgatatttttttattttttataaagtttttttataaatattatttaatttttataatagttatttagtgagttgtttttatttttattttatagagtgggaagtataggggttaaggtgaagttttattattagtaagggttagagtttggattatgattttag

SEQ ID NO: 4075 - DNA, 2432 bp, Artificial Sequence
  chemically treated genomic DNA (Homo sapiens)
gatttttttatttgtgagtttttgaagaattttgtatataatgttaatatggtgttggttatattttattttgatttttattgtgtttatgttttttattagattgtgagttttttgaggataaggatttggttttatttatttttatttttaggtttattttaatttggaatggagtaggtgtttaataaatatttattgaaatggatattaaatttgaataagttttgaggatttttaagttttttagggttggagagaggaattattaaattttttttgatatttgggatatatatatagtttataataattaaaataattaaatttggatgatttaggatatttgagtttttttttttatattttttattattttggtaaattttttaatttttttaagttttaatagttttatttgttattttgaagtaatttatgtgttggttagggttaggtatgtttagaaatgttatttgttttagtttttataataattaaggtatatgagtatttgatttttattttatagatgagaaaaatggaggtttagagagattgagtaatttttttattttatatagttagtaagtagtagagttgggattagattaggttttttaatttagagatattatttatttatttattgttttttttagaaaaatttttattgagtatttattgtattgttggtatagttttagatgttaggggtatagtagtgattaaggtaagtgattaaagtgtttttatatttatggtatttatattttttttttgttatgtatttttttaaagttggtgatataatatgagaggggtaataggattgtagtggttttaataaggtttagtatatatagtagttttagaatgagagtagtaagattaattagttaatgttaatttttattataggtggagatggagtttgatgtgaagttatgttttgtttgtttaggatagggtaggttgaagttttttagtatttgtggttgggttgggttaggatagagaggggagaggtaatttggaagttgtaggttataagtttttttttttgttattttgtgttttttttttagttttgtttttagttaagtataggagtagttgtttaagtttatgatgtgttgtgtgtaggttgtagatttattattatttataataggttgttgtttttattttttatttatagaggtggttgagttattatttatggttattgtagttgttaaattgttttgggggttgagatttatatagtagttatgtgagttgttataaatttggggttgggaggaggatgtttttaattgaattagagttgatgattgatagatagggatagtagagattagttttattaattttaaaaagtttaggaagtttttatttagaatgtattttttggagataatagtggtggagtttaggttatgtatgagataaagaaaaaggtttagaataagtgggtgtatatttgtattttggaatagttaggaagatttgggagtgggaattagaggatggatttttattttttttttttatgatattaaatttgtgtagtaattatgttttttatttgaatagtggtttttaataattagttaataatgggatataatttttatagtttttaattttaagattttaaaatatattatgaataattaaatgttattatttagtgatttgggtaattaaagatttttttaattgttatttttttttttttgttgtgtttagaatatagtttagtattatgtttttaaatgaggaaattgaggtatagagaggttaggtgaattggtatagattatttgatattttattgtggtttttagtttttattttatattttttttttagggtttttagtattgtgtttttgtatgattgattgtttttttttttttagttttaaattttatttttatttttatttattttagatattattatttaaatgttttttgttgaaattatttttatttttattggggtaggtgtagggatttagtaggataaattggttatttttttttttggttttattttggttttttttttattatttaaattttttattttgaataaagtagtaaaatgtatttttttttttatgtggtttagtataaggataggtttggatttttataatgaaagtttatgtttttaataagtgtttatagttagtgttttttgtatttatttaattgttgttttttgaaagttattattttttattttttgtgattaatgtgtattgggagttaaatttatatgtgtgtgtaggattttatttttaaagatatgttttattattgtttattgatagggtttttaattttaagttaggatttatgtatgttagaggttgtggtgagttatgagtattgtgtttatttatgtatgggtataaa

SEQ ID NO: 4076 - DNA, 2432 bp, Artificial Sequence
  chemically treated genomic DNA (Homo sapiens)
tttatgtttatgtatgagtaaatgtaatgtttgtggtttgttatagtttttggtatgtgtgggttttggtttggggttgagagttttgttaatggatgatgatgaaatatgtttttggaagtagggttttgtatatatgtgtgaatttagtttttagtgtatattagttataggaaatagaaaatgatagtttttaggaggtaatagttaaatggatgtagagggtattggttgtggatatttgttagaaatatgaatttttattgtagggatttaaatttgtttttatattaaattgtatgagaaggggggtatattttgttattttgtttagggtggaggatttaaatggtaagagaggggttaaggtgaggttaggaagggaggtggttaatttgttttgttggatttttgtatttgttttagtgggaatgagggtgattttaataggaaatatttaaataatggtgtttaggatgggtaaaggtgggggtgggatttggggttggggagaagggggtagttagttatgtagaggtatagtgttgaaggttttggagaaagagtgtggagtggggattaagagttatgatgaggtattagatgatttgtgttagtttatttggtttttttgtgttttagtttttttatttgagaatatggtgttgagttgtgttttgggtatagtaaaagaaaaaaaatgatagttaaaaaggtttttgattatttaaattattaaataatggtatttaattatttataatatgttttgagattttgggattgaaagttatggagattatattttgttattagttggttgttaggaattattgtttaggtaaaagatataattattatgtgaatttgatattatgggggaaaggagtagaggtttattttttaatttttatttttaggtttttttagttattttagggtgtgaatgtgtatttatttgttttgagtttttttttttattttatgtatggtttgggttttattattgttatttttagggagtgtattttgggtgagggttttttgggttttttggagttgatgaggttggtttttgttgtttttgtttattaattattagttttaatttgattgaaaatattttttttttaattttaagtttgtggtagtttatatggttgttatgtaaattttagtttttggagtagtttaatggttgtggtgattataggtggtaatttagttatttttataaatggaaagtaaaaataataatttattatggatgatggtaggtttgtaatttgtatgtagtatattgtaaatttgagtgattgtttttgtgtttggttgaggataggattggggagggggtataaagtggtaggagaggagatttgtgatttgtagtttttaggttgttttttttttttttgttttggtttagtttaattataggtgttaaagaattttaatttgttttgttttgagtaagtaggatgtggttttatattaggttttatttttatttgtggtgggggttagtgttggttggttagttttgttgtttttattttaaagttgttgtgtatgttggattttattggggttattgtagttttgttgttttttttatgttgtgttattagttttgggggggtgtatgatagaaggaaagtgtaaatgttataaatatggggatattttaattatttgttttagttattgttgtatttttagtatttagagttgtgttaataatatagtgggtgtttaataaagatttttttgagaggagtggtaaatgaataagtaatgtttttgggttgaggggtttggtttgattttagttttgttgtttattagttgtgtaaagtgggaaagttatttaatttttttgaatttttgttttttttatttataaagtggaaattaagtgtttatgtattttgattgttgtgagggttaaaatagatggtgtttttaaatatatttagttttggttggtatatgagttattttagagtgataaatgaggttattgaggtttagagaggttaaggggtttgttaaagtggtggaaaatgtaggagggaaagtttaggtgttttgagttatttagatttagttattttaattgttgtgaattatgtgtatgttttagatattagagggaatttggtggtttttttttttagttttgagggatttgggagtttttagaatttatttaggtttgatgtttattttagtaagtgtttattaagtatttattttattttaaattggggtgaatttaggagtaagggtggataaaattaagtttttgtttttaaagagtttatagtttggtggagaatataggtatagtggaaattagaatagaatatgattagtattatattggtattatatatagagttttttagaaatttataggtgggagagtt

SEQ ID NO: 4077 - DNA, 2475 bp, Artificial Sequence
  chemically treated genomic DNA (Homo sapiens)
tggagagtatagtggttttttttaggaagttattttgatttttatttagatttttttttttgtgttaggtattgtgttttttttatagttttttttatagggtttttttttgatataattggtatttgatgtttttgtttttttgaaaataaggaaatagagggttagggaagtaattggtatttagtgttgttagggttttgttttttgtagatgaggagataaagggttagggaggtagtgggatggatatgttgaggttgttaggaaaagatagtttgatgtgtatttggagttgtttttgaaggttttatagaatttggtatagtgttaggtaatttggttgttttttttgttatatttattaattttagagtttatattttggtatagaaggaagagatttaggttggtgttgggttgtaatattttagggaaaggggtaaggagttttgatttgtttttatatttgtttgtttttaaattgggttggattttggttgggtggttgttgggtggtagttttgttttaggatatttggtagtaggataaggtgggggagttagttgttttgtgagttttttttaggattatttttttttgttttgttgagtagagatatagttttttgaggtttgagtttttattttttattatttttatttttgtttttggtatagaaaagttttagtattattttgttgaatgtggtattgagtgtatgggtgaggtatttttttaagtaatttattatagtaattttttaaatgtttatatagttttttgagaaggggattattattattgtttgtttatagatgaggaaatggaggtttagagaggttaagtgatttattggaagttatatagttggagttaggatttgaatttaggttttttagttttagtgtgtatatttttgtttatatgtttttgtttttagggtagtagtgagtttgaaatatgtgtagtgtttggtaggtagtaggtgtttttttaagttttttttttgttttatttagttttgaggttagtggtttgttttgttttgtgtttgggaggaatgtttgtggtggttttagtttggatttgagaagaaaggtagttttgtgggtgaaaggtgagtggttgggtgggtgtgggtgtgtttatttagggttggtgtgtggtttggggtggtgttgttgttagttgtgttggttgttttaggtttgtgttggtttttagatgtgagttggttttagttggttgggtttttttattttatgtatagaggggttttattaaaagtggttgtgaggaggtttaggaggttgtttggttttagtttgttggttttgagttttgggtttgtagaagttaggttagttgtatttgtgtttttgtgttttggtttttgtgtgttttatggtttagtttttttgttttttttgagttttttgggggtttaggtgagggatagtttttttgttaggaaattgaagttgtaggagtagtttgggaggggtaataatgttagaatttttttgtagtgtttatttttttgtattttaggggggtagaggtaatttatatggaataaaagtgtaaaatttattaaaatttagagagtgtttagtgagatattaaagtgtagatatttgtgggaaggagaaattgtagatttagagagttagtttttagtggggaggagagtaattggggttggggggtttgtaggggttatgttttttttgtggtatttttttttttaggtgggggtgggggtgttatttttttttttttttttttttggagataggattttgttttgttatttaggttggagtgtagtggtgttattgttggtttattgtagtttttgatttattgggttttagtagtttttttattttagttttgtgagtggttgggattttgggtatgtattattatgtttagataattttttaaaaatagagatagggttttgttatgttgtttaggttggttttgaatttttgagtttaagtaatttttttgttttggttttttaaagtgttaggattataggtgggagttattatgtttggtttttagggatgttattttgtatattttatttagtggtttgaattattttgtaataataaattataataattgggaaaaaaaatagagaaaaaatttgagatatttatttgtttttgatttttagttttatttttgttaaaaatggtttttaatgttttttagagattgtttgaatatttataagaaaatttatatatattttttgtttttttttgtttttggttttataaatagtattaaaatatagtttgagtatagtggtttatgtttataaatttagtattttgggaggttaaggtggatggattttttgaggttaggagtttgagattagtttggttaatatggtgaaaatttatttttattaaaaatgtaaaaattagttgggtatggtggtgagt

SEQ ID NO: 4078 - DNA, 2475 bp, Artificial Sequence
  chemically treated genomic DNA (Homo sapiens)
gtttattattatgtttgattaatttttgtatttttagtagagatgggtttttattatgttggttaggttggttttaaatttttgattttaggggatttgtttattttggttttttaaagtgttgggtttataggtgtgagttattgtgtttagattatattttgatattatttataaaattaaaaataaaagaggatagagaatgtatgtggatttttttgtgggtgtttagataatttttagaaagtattagaagttatttttaataggagtagggttgagggttgggagtaggtggatgttttaggttttttttttgtttttttttttagttattatgatttattattataaaatagtttaggttattgaataaaatatatagaatagtatttttggaggttaggtgtggtggtttttgtttgtaattttagtattttgggaggttaaggtaggaggattgtttgaatttaggagtttaagattagtttgggtaatatggtaaaattttgtttttatttttaaaaaattatttgggtgtggtggtgtgtgtttggagttttagttatttgtgaggttgaggtgggaggattgttggagtttagtaggttaagggttgtagtgagttagtgatggtgttattgtattttagtttggatgataaagtgagattttgtttttaaagaagaaaaagaaaaagaataatatttttatttttatttaaaaaagaaaatattgtagagaaaatatagtttttgtaaattttttaattttagttatttttttttttgttaagaattggttttttgaatttgtaattttttttttttatgagtgtttatattttgatgttttattgagtattttttgaattttgatgaattttgtatttttgttttgtgtgggttatttttatttttttggaatgtagaaaaataaatgttgtaggagggttttggtattgttattttttttggattgtttttgtagttttagttttttggtaaaggggttgttttttgtttgggtttttaggggatttgaggagaatagaggagttgggttgtggagtatatgaagattagggtataagagtataagtgtgattggtttggtttttgtaggtttggggtttagagttagtaggttggagttaggtggttttttgggtttttttatagttgtttttgataaagtttttttgtgtgtggggtgggggggtttggttggttggagttagtttatatttggaggttagtataggtttggggtagttggtgtggttgatagtggtgttattttgagttatatgttggttttggataaatatgtttgtgtttatttagttgtttattttttgtttataaggttgtttttttttttggatttaggttggggttattatgaatattttttttaggtatagggtagaatgggttgttgattttaaggttgagtgaagtaaaagaagggtttggaaaagtatttattatttgttaggtattgtatgtattttaggtttattgttattttgggagtagagatatgtgggtaagaatgtgtatgttggagttaggagatttgagtttaaattttagttttagttgtgtgatttttagtaagttatttaatttttttgagtttttatttttttatttgtgaatgggtaataataatagttttttttttagagggttatgtaaatatttaaaaagttattgtagtaagttgtttggaggagtgttttatttatgtatttaatattatatttgataaagtgatattgaggtttttttgtgttaggaatgaggataaagatggtgaaaaatggggatttaggttttggggagttgtgtttttgtttagtggagtaggaagggatggttttgaggggaatttatagagtaattggtttttttattttgttttgttgttgggtgttttgggataaggttattatttagtggttatttagttaggatttagtttagtttggagataggtaggtatgggagtaggttaaggttttttatttttttttttgggatattatgatttagtattagtttggattttttttttttgtgttaaggtgtgggttttggggttggtgggtgtggtaggagaggtagttgggttatttgatgttgtgttaggttttgtgagatttttagagatagttttaggtgtatattaggttgtttttttttggtgattttaatatatttattttattgtttttttggttttttgtttttttatttgtaaggggtggggttttaatagtattaggtattagttatttttttgattttttgtttttttgtttttaaaaggataagagtgttaggtgttagttgtgttgaggagagattttgtgagagaggttgtgggaaaagtatagtgtttggtataaagggagaggtttgagtaaaagttaaggtggttttttggaggaggttattgtgttttttg

SEQ ID NO: 4079 - DNA, 2456 bp, Artificial Sequence
  chemically treated genomic DNA (Homo sapiens)
tatttgtatataatgtaagatatggatataatatgtagtgttagtttgtatttttttatttgaatattttatataaattattatagataggataaaaaagatatatatttatttaaatgattttttagtttttattttaaaagtagaagatatgtatttaagtagtatatgttatagtgtttttttttttaaattatttgtttttagtttttagggattttgttttgttatgttttattttattgtttaagaaattaagattttgttagtaagagggttaatatgataaattattgatgatttttagtatggagttaagaagtttgtttttttgattagatttttagttggaaagatatttatattttgtttagtttaatatttgttaagtgagaatataaaatttaaagatgttttgttatattttagatttgtattaatgtttataaatattaaagatttatatgatatatatttaggaaatatatgttattttgttattgtttgaatttttaggaaataatgtttttattggtgttttgaattgttattattttttgttattttgaagataattaatatgtatttatttgtgtttaattttagttttagattatggtattggtgtgtgagaaataattggtttaattaattataagtaatatattaattttgtttttttttttttttttttgagatggagttttattttgttgtttaggttggagtgtagtggtatagttttagtttattgtgatttttatttttggggtttaatttttttagatatttttgttttagttttttgagtagttgggattataggtgtttattattttatttagttaatttttgtatttttagtagagatagggttttattatgttggttaggttggtttttaatttttgattttgtgatttgtttgttttagttttttaaagttttgggattataggtgtgagttattgtgtttagtttaattttgtttttataggtattggtttttattttttagttattggtttttttttttttgtaatttaggtttgtaatataattttttagttttttaaggaaaatagaattaaagatttttaatagaagattttagtttattaatatagttaatagttattaaagttatttaggtattggtttaataaaaaattaaagggttgtagtaagtgattagatttttattatttatttttgtgagatgggttttagagggttttgtttttgttgatattaattatttttattggtagtttgttaatatataagtagtttatagtagaatattgtagattgtagggtatttttaggttatatagttttaagtttttagaataggaattgaggtttggaagaaggttagtgtagtgtatttagtgaatggataaattgaattattattttataaggttgtaagtttatgtattaatggaattaatatggaattagagttaaattattgttttaaatatttaatgtatgttaagaaatttatttaattattaagtattgaaattataatatttttaaatgaatttataaagtaaaatagttgaattaatgatttgtaaggattttttggtagataaattttattgggaattaatatattattgttattaagaaagtaggtttaataaatgaataaaagaaatttagttaggtagagaggtttttgtttgtaattttagtattttgggaggttgaggtaggaggattgtttgtggttaggagtttgagataagtttgggtaatatagtaaagttttaaaaaaaattatttaggtttggtggtttatgtttttatttttaatattttgggaggttgaggtgggaagattatttgagtttaggattttgagtttgtagtgaattatgattagattattgaatttgagtttgggagtaggttgagattttgagattttgttttaaaaagtaaaaaatagaaatgttagttttttttatttagagttaaaagtttttatttattatttaattttattatggtttttttttaaaagtttattggtatattatattaagttagtaagtttttttttttgtagtagggttttattttgttgttaaggttggaataagttttttttaataaagttaagatggtttatattatttatgtggatgagggtgttgaaggatatttattgtttttttttatggttttattttatgattaaattaagatgtataggaaataggtttgataatttatttttattaagaaagatgatttagtaatagtggtagagttgtttgtttgaatttaattttggttattttagtttgaaatataaatggtagtatggagagtaggttgtttgttttttggttggatattttttttatttttgagtttgaggtatagtaaattttttaaattatttagatgtaaatattttaatatttagattaggg

SEQ ID NO: 4080 - DNA, 2456 bp, Artificial Sequence
  chemically treated genomic DNA (Homo sapiens)
ttttggtttgagtattggaatatttatatttgaatgatttgggaaatttgttgtattttaaatttaagagtgaaagaaatgtttaattaaaaagtgggtagtttgttttttatgttgttatttgtattttaaattgagatgattaaggttaagtttaaataggtagttttattattgttgttgaattgttttttttggtaaaggtaaattgttaaatttattttttgtgtattttggtttgattatgaagtgagattatgaaggaaggtagtaaatgttttttaatatttttatttatatgagtaatatggattattttagttttgttgaagagggtttgttttagttttggtaatagagtgagattttgttataaaaaagggggtttgttgatttgatatggtatgttagtgaatttttgggagggagttatgatgggattgggtagtaggtgaaggtttttagttttgagtaaaggaaattggtatttttgttttttattttttgagatagggttttagggttttggtttgtttttaggtttgagtttagtggtttgattgtagtttattgtagatttaaaattttgagtttaagtgatttttttattttagttttttagagtgttaggagtaaaggtataggttattgagtttaggtgattttttttaaggttttgttgtgttgtttaggtttgttttaaatttttggttgtgggtgatttttttgttttagttttttaaagtgttgggattatagataagaatttttttgtttggttgggttttttttatttatttgttggatttgtttttttggtagtagtggtgtattgatttttagtaggatttatttgttaggagatttttatagattattagtttagttgttttgttttgtgaatttatttgaaagtattataattttggtatttagtaattagatggattttttgatatgtattagatatttaaggtagtaatttaattttggttttatgttgattttattagtatatgggtttgtagttttgtgaaatgatgatttagtttatttatttgttgagtgtgttgtattgatttttttttaagttttagtttttgttttaggaatttgaggttatgtagtttgaaaatgttttgtagtttgtagtgttttattgtgaattgtttgtgtgttggtaggttattggtaagaatggttggtgttagtagggatggggttttttgagatttattttataaagatgagtggtgaaaatttgattatttgttgtagttttttagttttttattaagttgatgtttgagtagttttaatagttattagttatgttagtagattgagattttttgttagaagtttttagttttgttttttttgggggattaagaaattatattgtaggtttgaattataggaaggggagaattaatggttagggaatgagagttaatatttgtaaaagtagagttgggttgggtgtggtggtttatgtttataattttaggattttgggaggttgaggtgggtagattatgaggttaggagttagagattagtttgattaatatggtgaaattttgtttttattaaaaatataaaaattagttgggtggggtggtgggtgtttgtaattttagttatttaggaggttgaggtaggagtatttgggagaattgaattttgggggtggaggttgtggtgagttgagattgtgttattgtattttagtttgggtaatagagtgagattttgttttaaaaaaaaaaaaaaaaaagtagagttaatatattgtttatagttagttgaattagttgttttttatatattagtgttataatttaaagttgagattgaatatagataggtatgtattagttatttttaggatggtagagaatagtaataatttggagtattaatgggaatattgttttttgagagtttaaatagtaataaagtagtatgtgttttttaaatatgtattatgtgaatttttaatatttgtggatattaatataaatttagagtgtgatagaatatttttgaattttatatttttatttaataaatattggattaggtaaggtgtggatatttttttagttgaaaatttgattaaggaggtaggttttttggttttatgttaagaattattgatgatttgttatattggtttttttgttggtaaaattttagttttttaggtagtggaatgaaatataataaaataaaatttttagaggttaggaatagatagtttgaaagagaagatattgtagtatgtgttgtttaagtatatattttttgtttttggaatggaaattaggaagttatttaaatagatatgtgttttttttattttatttgtagtaatttatgtgggatatttaaataggaaaatataggttagtattgtatattgtatttatgttttatattgtatataaatg

SEQ ID NO: 4081 - DNA, 2488 bp, Artificial Sequence
  chemically treated genomic DNA (Homo sapiens)
tagaagtttttttaggtgtaagtgttagggaaggatgttgagataagagggagttagtgaagattgaaggaagagtgttagatagaggggttagtagatgtagagttttagggtgattggtggaagaaaggttagtgtggttggagtttggagggtgatagggagaggggtagaatttgaggttagagttgtgatttggggttgatggaataaggttttatgggttaaggtaaggaatttggtttttattgttagtaagttaaagatttgttagaatgttgagagttttgatttgtgtttgtagagatggatgagattgggtttagtgtaggtttaggattgggggatgtgtggtttgtgatagggtggtagagagggtatttaggagttgtggaaagattttggatatattttggaggtttttaattatttttatattttgttttttatagtagagtttttttgttagtgatttatgtttggtttttttatattgtggtttgagtattagagagtaatattgtaaagtttaattttttatagtttattgtaggaatgattttatttttgtttttaaggttagtatggtggagggattttatggtatgagtttttatgatgatattagatattggatattaaggagtgtgatgtttatttttggtttttagtgatttttgggtatagtttggatataaaagttagaatttgtttgatggttttttttttaagaaaaaaaaaaaaaaaagtaagtaagtttagggaagtagtttttttttttttggttaatatgaagttaagtgttttattattgtttagtttttttttaaatataaaaatattaattttaaaaagatattgtaaaaagtttaagaaatatgtatattgaatttgatttatgtatattattgtagttaatatttttagggaaatttttaaatgtttgttataggagtttgttagaaaaagaaagatttatttttggaaaagtatgttttttggtgtttattgagtttggaaattatggaaagttattgttagaagggaggtagttgttttagaggtggagtggaagttaggattggagaaggttgttttattgtgggttttagtgtgttttttgttgttagttggttaagagttttgtagtagttattttatattttattagttttattattgtaattatttttgttaaaatgaaatataaaagaatggtatgtttatgaatattttttatagaaaatatatttgtttgattattttttataaaatgtgaagttaatttttttttttatttttaattatgaaagtgaagtttggaagttttaatttttttgtaatggaaagatttgagtttgtggttttgtttttattttttattttttttttgttaagttaggaatatgatatttatataatattttttgggtagtggttttgtttaggaattgtatggttgtttgattgtagagggagggtaaaggttattattaattatttgtgttattgttgggttatgaaatttttaggggataagtataagttttataaaattttattttgaaatttagattagatttggttttatgttttgaggatttttttttttttttaagttttatgttgtttttttgtttttttttatttttttttgggaagagttttttattattataattattatttgaaaaaaaattttaagtaagaaagtagtgtattaattggaaagtaataatttagaaatgttattttttaatagtaagtttttatagtatttttgggtagaaaggtatttttatagaaatagttatttttttatttttttttttatgagtttataaaatagtatttttatattaatttttgttatatttaatatataaaattagtatttttttaagaatttagaagtttaagatatattaaaaatatttttgataataatttttatttttagaggtagtgttgttaataagttttatgtatttatttttagatttaataaaaatatgtttatttatatttatatatggtatttttgggtgggtatatgttagaagatttttttaaattgtgtttaattatatataatttaaaatttttaggtatatagttttgtggtattagtatatttatattgttatgtaatttttattattattatttatttgtagaatttttttttttttttttttaagatggagttttgttttgttatttaggttggagtatagtggagtgattttagtttattgtaatttttattttttagatttaagtaatttttttgttttagttttttgagtagttgggattataggtatgtgttattgtgtttgattaatttttgtatttttagtagagatgaggttttattatgttggttaggttgattttaaatttttgattttaagtgatttatttgttttggttttttaaagtgttgggattataggtgtgagttattgtttttagtttatttata

SEQ ID NO: 4082 - DNA, 2488 bp, Artificial Sequence
  chemically treated genomic DNA (Homo sapiens)
tgtagataggttgggagtagtggtttatatttgtaattttagtattttgggaggttgaagtgggtagattatttgaggttaggagtttgagattagtttggttaatatggtgaaattttatttttattaaaaatataaaaattagttaggtatggtgatgtatgtttgtaattttagttatttgggaggttgaggtaggagaattgtttgaatttgggagatggaggttgtagtgagttgagattattttattgtattttagtttgggtgatagagtgagattttgttttaaaaaaaaaaaaaaaaaaattttgtagatagatggtgataataaaagttgtataataatgtgaatatattaatgttatgaaattgtatatttaaaaattttaggttatgtataattaaatataatttaaaaaaattttttgatatatatttatttagagatattatgtgtaaatgtgggtaaatatatttttgttaagtttggaagtaaatatatagaatttattaatggtgttatttttgagaatgagagttattgttaaaaatatttttagtgtattttaaatttttaaatttttaaaagaatattgattttatgtattagatataataaaaattgatataaaaatgttattttatggatttatgagaaaaaagataggaaaataattgtttttataaaaatatttttttatttaggaatattataaaagtttattattaaaaaataatatttttaaattgttattttttagttaatatattgtttttttgtttggaatttttttttaagtagtaattatgataataagagattttttttaagagaaaatgaaggggggtaaagggataatatgaaatttaaaaaaaaaaaaaaatttttagagtataaggttagatttggtttggattttaaaatgaaattttatagaatttatatttattttttgaaggttttatgatttaataatgatatgaatggttaataatagtttttgttttttttttgtagttaaatagttatgtaatttttgaatagagttattgtttgggggatattatgtgagtattatgtttttgatttagtaaaggagaagtggaaaatggaaataaggttataaatttagatttttttattataaagaaattgaggtttttgggttttatttttatgattaaaaatagaaaaagaaattgattttatattttatggaaaatagttaaatgaatatattttttgtgaagaatatttatagatatgttatttttttgtgttttgttttgatagaaataattgtgatggtggagttagtgaggtataaagtggttgttgtgagatttttgattagttagtagtaagaggtatgttggagtttatagtaggataattttttttagttttgatttttattttgtttttggagtagttgttttttttttgataatgattttttataatttttaagtttaatgaatattaggaaatatatttttttaaaaataaatttttttttttttgataagtttttatgatagatatttagaaatttttttgaaaatattagttataatagtatatataaattaaatttaatatatatgttttttgggttttttatagtatttttttaaaattaatgtttttgtatttgggggaaaattgggtaatagtgaaatatttggttttatgttgattaggaaaaaggagattgtttttttgaatttgtttgttttttttttttttttttttaaaaaaaaaattattaaataagttttggtttttgtgtttagattgtgtttaaggattattaaaaattaggggtgagtattgtattttttgatgtttaatgtttgatgttattatagaaatttatgttatggaatttttttattatgttggttttggaggtaagaatggggttatttttgtagtgaattgtgggaggttgaattttataatattattttttaatgtttaagttatagtatgaaagaattaaatatgagttattgatagaaaagttttattgtggaaggtagaatatgagagtggttgagggtttttaaagtgtatttagaatttttttatagtttttaaatgttttttttgttattttgttataagttatatattttttgattttgagtttatattaaatttagttttatttatttttgtaaatataaattagagtttttaatattttaataggtttttggtttattaataataaaagttaaattttttattttggtttatgaggttttgttttattaattttaggttatagttttggttttaggttttgtttttttttttgttattttttaagttttagttatattggttttttttttattagttattttagagttttgtatttgttgatttttttgtttggtattttttttttagtttttattggtttttttttattttagtatttttttttagtgtttgtatttaaggggattttta

SEQ ID NO: 4083 - DNA, 2471 bp, Artificial Sequence
  chemically treated genomic DNA (Homo sapiens)
tgtaaatgaagttatttgttaaattaggggttaggtgtttagtttttatttatttgggttgtgtttttggttaatggttgaggtgattttttaggtatttatagtggagtatgtttttattttattgaatagttttgaaaattagagaagttgaggaaattatgttaaaattttttgagaaattttttttttgtatttggtaaaggtgaattagaatttgttatgtgagtgaggaggatattttttaatgaggtaagagttttataatttttatagttgtttagaaagtttttttgtgtgttttgagagagattgaaataaagggaagttgaggatagtttggttttgttttttgaaattatttattaaagtaagattattttaatttaatatgagaagtatatgtgtaattgtgtgagtgtgtgtttgtgtgtgggggtatatattgaaagaaaataaataaggatgaaggaaagaggaaaatagaattgttttatggaatatattgtgtattttaattaatgttttttatatttttattattttgtttgtaattttatttattattaatgaaattgttaatttgggaataatgttttaggtgttaggtgttatatttaataagaatttaaagagtgaaaggataaatggagggttattagtgtttaagatggttttttgttggttgttttggtgaagaatagtaatataaagggtaagagaaggattaatggaaattattgaataaagtgaggtttttgagttatttttagattgttttgtgtgttgttgtatttgtattgtagtgtggataattgtggtaggttattgttttagttttgttgtgagatagattttaatttattattttattttttagtatgagttagttaagggaaaaggatatttttagaattagagtgttttaagttttttgaaaggttattgttatttttttttttttttggtagtttttagtaaagtagaaatatttggaagttaattttgtttttttaatattgttgtgagttgattttatttgtttgagataaaattttttttttgatttagtagtgtttatggttgagttggttatgagatagaggattttgtgtttttaattatttttggatgaaaagttttgtaggtgagtggagatttggggtaaagatggttaggtggagttgttattagtgagtagtggattgtagaaatggagagataattaaattaaaagtgttaggtgtaggtattgaaaaataattttgggtgttaattatgtagtttagtgttagtagaggaaatgttattggtttgtttattatgtggtagttgaaaagtttgggaaagatatatttatggtttttagagaatttgttagggttgtttatttgggattttggtgaagtagagattatttattagttggagtgtgtatattttttttattttttatttagttaagttgggtatttggtgggtatttggtgtgtgggggattaattttgatttatatgaaaatttgaatgttggagtgtgttatttttaatttaggtatttaggagtattttttttttttttgatttgaaatgaatttgattttaggggttagaggtagtgtgtttttgttatgaagatggaaggataaatggtggtgtgtttagataatggaatagagtatagtaattaaaaggaggggattttagtagtataatagtagtatgattgtgttataagtatagttgaatgaatgaaagaagttagattttaagatttattttgtatgaatttattttggtgatgttttagaataggttaaattaagttatggaggtggatgttaggtttgtggttgtattagggaatttttggggtaatggggtaatttttttgggttgaagggtatatgaatgtaaatattttttaaaatttgttgaatgtatgtttaaaatttgtgtatatttttgtatggaaattattttttaatgaaaggaatgtgaaaagatttttttatgttttgtttttttatggattttgaattttggttagttagtttattttaaaaggtgataaggattaatttgtttgtggttttttttgattatttagtttttttttgtttatagatttgtttagaaaaggtttttattttaaggaagtagaatggaaaatagggtggtttattatagtttttgggttaaatttgtttaattatatttttgtaagtaaagttgtattgggatatagttatatggttagttatttatgtgttttttgtggttgtttttatgttatagtgatagttgaggagtttttatagagattgatttattatttaaagtgtttattttttatttttttatagaaaaggttttttggtttttggtttaaatatttatttttttttggaatttttttttttagatttgtgtgggtggaggttttggatggagagtgttttttaggaatga

SEQ ID NO: 4084 - DNA, 2471 bp, Artificial Sequence
  chemically treated genomic DNA (Homo sapiens)
ttgtttttggagagtattttttatttaaaatttttatttatatagatttgaagggagaagttttaaaaagaaatgaatgtttagattaagggttaggaaattttttttgtaaagggatagagagtaaatattttaggtggtggattagtttttgtaaaagttttttggttgttattgtggtatgaaagtagttatagaagatatataaatgattggttatgtggttgtgttttaatataattttatttataaaaatgtgattgagtagatttggtttaaaggttgtagtgggttattttgttttttattttgtttttttggaatgaaagttttttttgaataggtttgtgaataggaaaaggttgggtggttaggaaggattataaatagattaatttttattattttttgaaatgaattgattgattagggtttaaaatttatggaaggataaaatatgggaagatttttttatattttttttattgagggataatttttatgtaagaatatgtatagattttaagtgtgtatttaatagattttgaaaaatgtttatatttatgtgttttttagtttaagaaagttattttattattttaaaagttttttgatgtagttatagatttgatatttatttttatagtttagtttaatttgttttagaatgttattaaaataaatttatgtagaatgggttttgaggtttggttttttttatttatttaattgtgtttgtaatatagttatgttgttattatgttattggggttttttttttttgattattgtgttttattttattgtttgaatatgttattatttatttttttatttttatgatagggatatattatttttgatttttaaaattaaatttattttaaattagaaagagaagaaatatttttaagtgtttaaattggaagtgatatattttaatgtttaaatttttatgtggattaaagttaattttttatatattaagtatttattaaatgtttaatttggttgagtggaaaatgggggaaatgtatatattttaattaataaataatttttgttttattagaattttaagtaggtagttttggtaaattttttagaaattatgaatgtgttttttttaagttttttaattgttatgtgatggataggttggtggtattttttttgttaatattgaattgtataattaatatttagggttattttttaatgtttgtatttggtatttttaatttaattatttttttatttttataatttattgtttgttggtgatggttttatttggttgtttttgttttgaatttttatttgtttgtaggattttttatttagaaataattaggaatatagggttttttgttttgtggttaatttagttgtgaatgttattggattaagagggaagttttattttagataaatggagttagtttatagtagtgttaaagggatagggttgatttttaagtgtttttgttttgttgggagttattaaaaaaaaaaaaaagtggtaatgattttttagaaaatttggaatattttggttttgggaatattttttttttttggttggtttatgttggggaatgaaataatgaattggaatttgttttgtagtagggttagaatgatagtttgttatgattatttatgttatggtatagatatagtagtgtataaggtaatttggagatgatttggaagttttattttgtttaatagtttttattaattttttttttattttttatgttattgttttttattaggataattagtaggaagttattttgaatattgatagttttttatttgtttttttattttttgggtttttattgaatgtggtgtttagtatttaaaatgttatttttaagttggtagttttattaataataaataaaattataaataaaataataaaagtataggaagtattaattggggtatataatgtattttatgaaatagttttgttttttttttttttttatttttatttatttttttttagtgtgtatttttatatataaatatatatttatatagttgtatatatattttttatattgggttaggatgattttattttgataagtagttttaaagaataaagttaggttgtttttgatttttttttattttagttttttttaagatatgtaagagaattttttgagtagttgtgggaattgtggagtttttgttttattaaaaaatgttttttttatttatatggtaaattttagtttatttttattaagtgtaggagagaaattttttaggaaattttgatatggtttttttagtttttttgatttttaaggttgtttaataaagtagaaatatattttattatggatgtttgggaggttattttagttattggttagaggtatagtttaggtgagtgagggttgggtgtttggtttttggtttgatagatggttttatttgta

SEQ ID NO: 4085 - DNA, 2495 bp, Artificial Sequence
  chemically treated genomic DNA (Homo sapiens)
tttttttatgtttttttttttttttgttgtatgttttatatttttagtgtgtgtaaatattagagtaaagttgtaggttgaaaattgtagttttaattttgtaagaattttttggtgttttgaaagaggtagagggtatttagttttatttttttttagaggttgtgttgttttaagtattagaggttttgtgttttgtggaggggagattatagattttgattttaaaatggaagggtagaaataagattgtgagttgggatttgggaggggatgtttaatttgaagtgagttatgtttgatgtttgaagttttttggggtttaagattaatgttgttgttatttttttttttgtttttttagggggtttttaggtaatggtgtgttggagttagtttgttttggtttttaagggttgattgttaaatttttaggaattttgtaaattgtttgttaaatatagttattattaaaaattaaattatagaaatttatagtgtaataaattatattaaaataaagttaataaatatttgaaatttattattttttatttttttttattattttttatgtttttgagggtttttttttaaatgtttgggtttttatatagtagatataagaaataatggttagttattgtgtatttttttttaattatatgtttagtgagattatattgtttatttgatattgattatgatgatagtgtttatattttagaaattggtaaatgttatagatttgggttttttttttgtaaatgttgattaggtatttataggtatatgttattttaaggtaattattgttaattagaggaaatagaaagaagtttattaagtttgtttttttgaatagttatggtagttttaggttaggtatgtagtatgtttgagggtaaggttgtgttttgtgggaaatttttattattgaaagggtttttagttataaggattttttttggtttgatagttagtttggaggagtttggggttattattttatataagttttttgttataattgtattttggtttattttgatatttggtgtttattttaagttgaggttttagggaagggtagttggaggttagtggtggtttttagtgatagatgggtagagtgtttgttttggtattatttagggtgtgggtagtagtggtttgagtaggtattattgatttgtaggtagggaaagtttgttaggttagttatgtgtttggtattaggaggagaggattagagttagtagtggttataatgagggtaaaatttttatagtggaatattgttatttaaaagggatgggtggttgtagggttttttggatggaagtataaatgagaaaatatatatgtttttgtaaatggatttgtttgggaagataaggttatagtatatatagttttttagtaatttaaattttatgtgttatgatgtagatatttataggataagtaagaataataaaatttttagttttgttttttagtataagataattgaagatatttgtggtgaaaagtatttttgttattaggaagatagataatagttagtaattaatgtttttttgttgtataagttaaaaagtttattaaatttattttttttttagtgtatatataagaatatatttggatatttttgtaaatttatatttaagaatagtgttttttaaattggttatttgaaagaaatttaaaggaaaaagtagatatttttataatatgtttttgttttgttgtagtttgtaattgtgaatttttgtaaattgttataattttggatgaatgatgggaatataataggttgtagaattggagaatgttaaatttttgtttttaatggtaaaatatgttttttttatttttattagaatgtgtgatttatgttatttgaaattaaattttaaatataatgagttattagtgtaatagtttattattaatagtggttttataaataatatatttttattatatatatgtagtttgttgtgaagttagtaaaaggtattttaggttattgaagttttgttgtgttagtgtggttgtagattagaaggatatttttatgtgaattaagatggatgttaattttttttgttgagagttaggttggttgtttttttttgtatatatggtagatggattggttaattagtgtttgttgagttttgggtttgaaattatagagaagttagataattgtggttatgtagtttttgtttatgagtgtaaataagataaataattatttgttatttgggaaaaaaattaaaatgtttattttggatttttattaaagtgttaatggttttataaaatagttgtgtaaatttaggtttttttagtaagtattattttagggggtttgtaaagaaaggaatatatatgaaaaaattaatttttaaaaattttttttatattttagtattgagaagaaaatagaggaggttttatttttattttgtaaatatgtt

SEQ ID NO: 4086 - DNA, 2495 bp, Artificial Sequence
  chemically treated genomic DNA (Homo sapiens)
aatgtgtttgtaaaataaaagtgagattttttttattttttttttaatattgaaatatgaggggaatttttaaaaattaatttttttatgtatatttttttttttataggttttttaaaatgatatttgttgaaaaagtttggatttatatagttgttttataaagttattgatattttaataaaagtttaaaataaatattttaattttttttttaaataataagtgattgtttgttttgtttgtatttgtgaataaaggttgtatagttgtagttgtttagtttttttgtaattttaggtttaagatttagtagatgttgattaattaatttatttattatatgtgtagaaagagatggttagtttgatttttggtagggaaaattggtatttattttggtttatatggagatgtttttttaatttatagttgtgttggtgtaataaaattttgatggtttgaaatattttttgttggttttatagtgagttgtatgtgtatgataagaatgtattatttataagattgttgttagtaatgagttattatattaatggtttattgtgtttggaatttgattttaaatggtatggattatatattttgatgaaaatgagaaaaatatgttttgttattaggaataaagatttaatgttttttaattttataatttgttatatttttattatttatttagggttgtaataatttataaaagtttataattatagattataatagagtaaggatatattgtggaagtgtttgtttttttttttgagttttttttaaataattgatttgagaaatattatttttaaatatgaatttgtaggagtatttaaatgtatttttgtgtatgtattgaaaaaaaaatggatttaatggattttttaatttgtataatagaaaggtattgattgttggttgttatttatttttttggtgatagaagtattttttattataagtgtttttaattattttatattggagaataaaattgaaggttttgttgtttttgtttgttttgtaaatatttatattatgatatataaggtttagattgttagaaaattatgtgtattgtggttttgtttttttaaataggtttatttatagaaatgtgtgtatttttttatttatgtttttatttaaaaagttttatagttatttattttttttgggtgataatattttattgtgagggttttgtttttattgtgattattgttggttttgattttttttttttgatgttaagtgtatggttgatttggtaggttttttttgtttgtaggttagtggtgtttatttggattattgttgtttatattttggatgatgttaaagtagatgttttgtttatttgttattaggagttgttgttggtttttaattatttttttttaaaattttagtttggagtaaatattagatgttaaggtaagttagggtatagttatgataaggaatttgtatgaagtgatggttttaaatttttttaaattagttattaagttaaagaaagtttttgtaattaaaaatttttttagtagtaagggttttttatagggtatagttttgtttttaggtatgttgtatgtttggtttggaattgttatggttgtttagaaagataaatttgatggatttttttttgttttttttggttgatagtggttgttttaaagtaatgtgtgtttgtaaatgtttaattagtatttgtgggggaaaagtttagatttgtagtatttgttgatttttgaggtgtaagtgttgttattatggttaatgttaagtgaatagtgtgattttattaaatatgtagttgggagggaatgtgtagtagttagttattattttttatatttattgtatagagatttagatatttaaaaaaaaatttttaagaatatggagaatagtaaaaaaaaatggaaggtgatgaattttaagtatttattaattttgttttaatataatttattatattgtaggtttttataatttaatttttaataatagttgtgtttaataagtagtttgtagagtttttgaggatttaataattagtttttgagagttagagtaagttggttttagtatattattgtttaaaagttttttagggaggtaggaaaaagggtagtaatagtattgattttgaattttaaaaggttttagatattagatatggtttattttagattagatgtttttttttagattttggtttatagttttgtttttgtttttttattttaagattgaggtttgtggttttttttttatagaatataaagtttttgatgtttgaggtagtatggtttttggaaggagatggggttggatgttttttgttttttttgagatattaaaggatttttgtagggttggaattgtagtttttagtttatagttttgttttgatgtttatatatattgaaagtgtgaaatatatggtaagagagagaaagaatgtgggggaa

SEQ ID NO: 4087 - DNA, 2364 bp, Artificial Sequence
  chemically treated genomic DNA (Homo sapiens)
tatttggaaaataaatgttaaagagaagattataatggtttagaaggttggaaattgagtagttagtaagtgtgagagagggattatgagatataggatttagattgtgttttattatttatttattgggtgtttttagttaagttatttttttttgtattttttatatttttatttgtaaaaatgagttaggtattgtattttttaagtgtttttttagggttttttgaaattttattggttttttttttttggtttttgtgtttgtattttagtttttgtttttggtattgaggattttatttatgagaaggttttttaattagttaggttttgtttagttttagagtatttagaatgtttttgaaattatgattttaggttatttaatttgtatttagaaatgttttggtttatttgattttatttttttatttaatattgagagataatgtaatagagaagaaagattataggtttgataaatgatttttaatttagatttttgttagtattagtttaatttttttgaattatattattattatttaaaagtgtaataatgggttgggtgtggtggtttatgtttgtaattttagtattttgggaggttaaggaggaaggattatgaggttaagagattgagattgttttggttaatgtggtgaaattttgtttttattaaaaatataaaaattagttgggtatggtggtgtgtgttagtaattttagttatttgggaggttgaggtaggagaattgtttgaatttaggaggtggaggttgtagtgagtagagattttattattgtattttagtttgggtgatagagtgagattttattttaaaaaaaaaaaagtgtaataatgataatagatttagtatatagagaattatttagaagaggaaagaaaaaattgaggtttaagaggtgaagttatttgtttaggtttaggtttatatttgaatttagattttttgtgttttattttagagttttttttttttttagagttaaggttagttgtgtttatatggatatggtagtaaagattggaattgaaagtatgttagtttttttaatatttttgttaatagtttttttaatttttttgtggtatgtgttaataatatagtttgtatttgttttagaaataagtgttttataagtatttttgtttgatttgttttggttggtataggatttagatgtttttagaatagtataatagattttttaaattagtttatttttattttgagttatttatagttttgatttgttgttggttggggtttatttttgagttttttttatttattatgtgaattatgtttagatttttgttagtttgtttttttttttttgagtagaagtaatatttattgtgtgtatattgtgtgttaggtattgtgataggtattttaaatagattattttttttaatttttataatttattaagttattaatagttttaaaggggaaagttgaggtttagtgaagtgaatgaatttattgaagttatatatttagtttttgaaagagttagagtttgaattgagttttgattttattgattaagttgtaaggtaagttgttttttgagtattatattgtttttttgttttttggttatggtttttttaggagggtagagtgtttgggagtatttaagaataggtgtttggtgttttgagtgtaataggaatgttttttatgtttttagtgtatttttttgagagtttttgtattttgtgttttaaattaatttttttagaatttagatatagagtttagagatttaagtattgagttagaagttatgtttttattgtgattatggaatagagtttttagtgaaaagtatatttgttttttttaaagttgaatagagagagtattttaagtaataatttttatttgtatgattaattttaaagtatagggaaggaaagggaaagggtttgtattttttaattgtgataagttttttttagggatttggtaggagtggagatatgtatatataaaagattttaggattaagattgttttgataggtttttaaatttgtatttaatagtttgtaaagtagtttatttttaagaaattgtattgtgaagaaattgaaggaatttgtttttatgtgatagagttaggggttagagtttaaatttttagttttgataatgttagtgaggttaagttttttttgagagggttttttttttggtgttgggtgtatttagtttttatttgtaaaaggagtaggtttttagtttttgttttttttttagtttttttttgtttttttgtttttttttttatttatttatatttaattgttagggatttattttaa

SEQ ID NO: 4088 - DNA, 2364 bp, Artificial Sequence
  chemically treated genomic DNA (Homo sapiens)
ttgaaataagtttttagtaattgagtatgaatgagtgaggagggggataagagggtagaggaaggttgagaaaaagatagagattaagggtttgttttttttgtaagtggagattgggtatgtttaatgttagagagaaaatttttttagggaagatttagttttattggtattattaagattaaagatttggattttagtttttggttttgttatataaaggtagatttttttagtttttttatagtatggttttttgaaggtaaattgttttgtaaattgttgagtatagatttgagaatttattagaataattttagttttaaaattttttgtgtgtgtatgtttttatttttgttaggtttttggaggagatttattatggttgaggagtatagattttttttttttttttttttgtattttggagttggttatataagtaggggttattgtttgaaatattttttttatttaattttgaaaaggataaatatattttttattagggattttgttttatgattatgatggaaatatagtttttaatttagtgtttggatttttgggttttatatttgagttttagagaagttggtttgaggtatagagtgtagaaatttttaggaaaatatattgaaggtatggaagatatttttattatatttagggtattaaatgtttatttttgggtatttttaaatattttatttttttggaagggttgtggttagaggatagggaggtagtatgatatttaggaaatagtttattttatagtttagttaatggggttaggatttagtttaaattttagtttttttagagattagatatgtggttttagtaaatttatttattttattgagttttagtttttttttttggagttattaatagtttaatgagttataaagattaagggagataatttatttaaagtatttgttataatatttggtatatagtatgtatataataaatgttatttttatttaagagggaaaggataaattagtaaaagtttgaatgtgatttatatgataggtagggaagatttggggatgaattttagttagtagtagattagagttgtgagtggtttggaatgggaataggttgatttggagagtttgttgtgttattttaagagtatttggattttgtattagttaaagtaaattaaataggagtgtttatggagtgtttgtttttaaaataagtatgggttgtgttattgatatgtgttataggggaattgagagggttgttggtggagatgttaaaaaagttgatatgtttttagttttaatttttgttattatatttatatgggtataattgattttggttttagaggggaaaaaaattttggaatgagatataagagatttggatttgggtgtgaatttgaatttgaataggtgattttattttttgggttttagttttttttttttttttttaaataattttttgtgtgttgaatttattattattattgtatttttttttttttgagatggggttttattttgttgtttaggttggagtgtagtggtgggatttttgtttattgtaatttttgttttttgggtttaagtgatttttttgttttagttttttaagtagttaggattattggtatatgttattatgtttaattaatttttgtatttttagtagagatggggttttattatgttggttaggatggttttaattttttgattttgtgattttttttttttggttttttaaagtgttgggattataggtatgagttattgtgtttagtttattattgtatttttaaatgatggtgatatggtttagaaagattaagttagtattggtaggaatttgaattgggggttatttgttaagtttgtagttttttttttttgttgtattattttttaatgttaaatgagggagtaggattaggtgaattaaggtatttttagatgtaaattgaatggtttgaaattatagttttaggagtattttaaatattttagggttagataaagtttggttggttaaaaagtttttttataaatgaaatttttagtattaaaggtaaaagttagagtataaatataagagttagaaaaaaggggttaatgaaattttagaaagttttgaagaggtatttggagaatataatgtttaatttatttttatagatggggatatggaggatgtaaagagaaatagtttgattgggaatatttaatgagtgggtgatagagtataatttgggttttatgttttatggttttttttttatatttgttagttatttagtttttaattttttaggttattatgattttttttttgatatttattttttaaatg

SEQ ID NO: 4089 - DNA, 2472 bp, Artificial Sequence
  chemically treated genomic DNA (Homo sapiens)
aggagtagaaaaataattattagttagatggaagaaattattagtttataaatgtagtgtgtttagtaataaaattttttaaaatgtggatgatataggtgtaatagaatataaagaggtttttagtggaaagtttgggaagttttgtagagatgtagtggattttgaaggttaagaatatggagttagataaaattaaattttaatttttattttgtgattttgggtaagtaatttaattttttttggatttagattttttatttgtaaagtggagagaatgatgtagggaagggaggggagtgggttattgtgtagatttatggaaataaaggatagatagtggatatggttagtttggttgttattattatttgttagtagttttagttataataagttagaggtaagattaatatttttttttttttttttttaatttttttgttttttatattgttataattatttttattttttttatttttgtttatttaatggtggttttttattagttagttatataaaagtatttttattgtagttatttatattttagtatgaatgagttagtatttttttgtagtaatttttattggaagttagtgggaagtgaaaggttttggttattttttataatatatgatttaaagtttgtttgtaatagagagtttttgtagagtttttaaaagaaaaggatttgttttttgaagaatttttgagattatagattttatggtgtttagttttttttggttgttatgtgttatttttaaagatagttatgaatatttgttttggttgatttgagttatttgaatgtttaaaatttattttaataataaaagttttttggagggattttaattaatttttttaaattgttttttttaaatttttggaattaatataatttgtttttttgttattaaaaaaaaaaaataaaattttaggatattttgtaaaattttttttaagttatttggtagttaatattttgttaaggaggtatggtggttaatttttttttgaatgggattggtttttatatagttattttttttggtttatgatttttttttttatttgttgtttatggatgttgaaaataatttgttttttggtaagtttgggatgagattttttatgatttaattagatttataatgaagtttttttagtttttaggagaaaatattttgaattgtagggttggttaagggtagggttttggtgaagaggaggagttttttgtttgagtagtatatttggagttaggagagttgtaatagggttatgttatttatttagtggggtgtttttattgtggttgagatttttggtagtgttttaaggtgtgtattatgtaagttgtgtttttttattttttgtagtttagattaaaggttttaaagataataggtaggatattgtatttgtaaatattagttgtttggtttaggaagagatagttttttatatatatatatatatatatatatatatatatatatatagagagagagagagagagagagagagagagagagagagaaggaggaggagagagattaggatagatttgttttggttgaaattaggatttttttgatggttttaaattgatgttaaattagaggataattttagatatgataataagttgggggtggtaaagtaggtgggtaattagggagtatttgagtaggtgatagagaattggataatgaagaagtaggtaaggtgatgggaagtagttggggtaagagggagtagttaggtaataaggtaaagtagttggagaatgggagagtaatttgatgatgaaggttaggtataaagtgggagttattgtagtggggtaatagaagatagttttagatttggggtagaggttattttgatttgttttagttgtttttattttgttatttttttaggttttgttgttgagaagtaaatttagtttaagtttgtattagttagttggaatttgggttgttgtaaattgttgtggtgaagttttttgggagtgaggttgaggttgtagtagtagtaggtaggtgtggtgagtttatttttttgagggaggggttttttttttttttagttttttaaaggatgggtgaggttgtttgttagaggttttggtataatttatatttgagtttttaatttttttattattatttttattttttttttaattagatttttattggataatttaagtattaggtattgtgttaaaaatttttttatgtattaatttattgtatttttttaataattttataaaataggaattgttagtaattttattttataggtggataaattgaggtttaaaaagtttaataatttgtttatataagaggtgtagttaggattgtttgattttagaatttgttttttaagttttatgttatagttatggttatttttatatggagtattttttttttaaaagtt

SEQ ID NO: 4090 - DNA, 2472 bp, Artificial Sequence
  chemically treated genomic DNA (Homo sapiens)
agtttttgaaggagaaatgttttatgtagaagtaattatgattgtggtataaggtttagaggatagattttgaagttagatagttttggttatgttttttatgtgggtaagttgttagattttttaagttttagtttatttatttgtaagatggggttattaatggtttttattttatagagttgttgagaggatgtaatgagttgatgtatagaaagatttttagtataatgtttggtgtttaagttatttaataaaaatttggttgagagaaggatgaaggtgatgatggggaaattgggggtttagatgtgagttgtgttaggatttttggtaggtaattttatttattttttgaggggttgagagaagagagagttttttttttaaggaaataaatttattatatttatttgttattgttataattttagttttatttttagggagttttattataatagtttataatagtttagattttagttaattggtatagatttaggttgagtttattttttagtagtaagatttaaggaagtggtaaaatgaaggtaattggaataggttagggtagtttttattttaggtttggggttgttttttgttgttttattgtagtaatttttattttgtgtttggtttttattattaagttatttttttattttttagttattttgttttattgtttggttatttttttttgttttagttattttttattattttatttgtttttttattatttaattttttgttatttatttagatgttttttgattatttatttattttgttatttttagtttgttattatatttggagttattttttaatttaatattagtttggaattattaagggaattttggttttagttagggtaagtttgttttggtttttttttttttttttttttttttttttttttttttttttttttttttttttttatatatatatatatatatatatatatatatatatatgtaggaaattgtttttttttggattaagtagttggtatttatagatgtgatgttttgtttattatttttgaggtttttagtttgggttgtagggagtgggaaggtatagtttatatggtatatattttggagtattgttaggagttttagttataatgggggtattttattgggtgggtggtatggttttgttgtagtttttttggttttaaatgtgttgtttaggtagggggttttttttttttattagggttttgtttttaattagttttgtagtttaggatgtttttttttgaaagttgggagagttttattatggatttgattaaattataaggaattttattttaagtttgttagaaaataagttatttttggtgtttgtgggtagtaaatggagaagaaagttatgagttggaaggaatgattatatagaaattaattttatttaggggaaggttggttattatgtttttttgataaaatgttagttgttaagtaatttgggggaagttttgtgaagtattttagggttttgttttttttttttaataataagggaatagattgtattaattttaaaagtttagagaaagtaatttaaagaagttaattagggtttttttaaagagtttttgttattaagatgggttttagatatttaaatggtttaagttaattaaaatagatatttatggttgtttttagagatgatatatggtaattaggaaaagttgggtattatgaggtttatggttttagaagttttttagggggtaggttttttttttttagagattttgtaagggttttttattgtaagtaggttttaagttatatattatgaggggtggttaaagttttttattttttattggtttttaatgaaaattgttgtaaaaaagtgttgatttatttatattaaagtgtaaatgattgtaataagaatatttttatgtgattgattgatagaaggttgttattgagtaaatagagatagagaaaatgggagtagttatggtaatgtggggagtagaagaattagaaagaaaaaggaagagatgttaattttgtttttggtttattgtaattgaggttattggtagatgatagtaatagttaaattgattgtgtttattgtttattttttatttttatgaatttgtatggtgatttattttttttttttttttgtattattttttttattttatagatgaggaatttgagtttaaaagaggttaagttatttgtttaaggttataaaatagagattaaaatttagttttgtttgattttatatttttaatttttaaggtttattgtatttttgtagagttttttaagttttttattgaaggtttttttatattttattgtatttatgttatttatattttgaaagattttattattgagtatattgtatttgtgaattaataattttttttatttggttgatgattatttttttattttt

SEQ ID NO: 4091 - DNA, 2397 bp, Artificial Sequence
  chemically treated genomic DNA (Homo sapiens)
tatttatttatttatttatttatttatttaaattttgtagagtgttttttttttggtggggtgggtgttaaatattggtaagttattagatgattttaaagtttatgttttttatttggaaaatggaaattataaatttaaaggaatgatgttatatagattgaatgagatttatgtgtgaaaaggttagtaaataagagttggaatgtaagtttattggtagggtagaaatatttttgattttgttttatgtttttggtattggtattgttgttggtatatgttagatagtgttattttagtgaataaaataataaatttagttttgtgttgtagatagggaaatagaggtttagagaaaatggtttgggtggggggggggggggtggggtggtttggtagttttatttagggttttatttattttttttttattttgaagttatgtatttgaaaagattgggaagattttttattttattagtggtttatgtgtttgatatgtttttttaagagatgatgatggtttttgtgggagttatagttgtttttagtgtagttataagtaagagggaagagggtaaagattttggaaaaagtaggataaagttttgtaaatatggatattatgtgtgtattggttgggggggttttttttttgagggtttttttttggttagtagaatgtttagaagaggggtttgggtgggtataggtaaataatttattttttaaaagttaaattttttagttgtagatagtattaattttgagttatttttagatatggaaaaatattgaggttttgagagttaatagatttggggttttaatttttggtttttatttttgagttatttgattttgagtaagtgatgaatgaaaatattttgattttgaggattttattagaaaatggggatgagaatatttatatgtaaaatgggatagtgtaagtttagggtttgatatggtgtttaatatttagtgaatgttagtttttttttttttttttttgtttttgtgataaatgttttattaggttagtatgtttgataaagttttatttgaaaatatgtttgagatttgtgtttttgttgggttttagggattagttggtaatttattttatggataatattattttttattaggggaaatattaaaaattaatttagaggattttatatttttttgttaggagtaaagttgttatggttattagataatgtattgattgggttggaatatagataaggatgatttttttttgtttttaatattagaaaggtaaaggttttagtgatggtttataggagaaatgttttgtggataaagagaatataattagtattagagtttggtagaaggtatttgattttaggtagtatttaatttattaagtagaggttaggagtttatttgatttttgtttggatgaggaaggtagggagggggtgttgggagaagtgggagataaagttaggaggaaattggaagtatgggtgtatttttaggttttattttttattatatttatatatataatgtatatttatatgtatatatatatatatatgtgtttattgattttagaaggttttaagttataagttaatgttaaaggttttttttttatttttagttatttgttatgattaagttaagattttttgattttgaatttagagttagggtttttatagaggatatgggtattttgtggatagaggttagggtaggtttttagagagttgggataggtattgattttttattattatttttttgtttttaatatttagatttttgggagaaattttaagaggattagaggttagagaagttgttggttttgattttaggagaaagtattttatgtttttgtttattttgagtgagataggagggttatatgggttagatggatgtgaatttagatgggttggggaggggaagttggaagggtttattatattaggtaatggtgtttttggttttgagttttaggaggtgagatgtttgttttttattggatttattaaattgtagggaggtttaagaaatgaattttagagtgtgatttaggagttttgtgtgtgggttgtgttattagttttttgggtgattttgagtaagtttttttttttgtttggtttttgttttttttgttgaaaagtgtatggttggtagtagatggtttatagtttttttttattgtaaatatttgtatattttggaggggaagtgatgataattagaagtatttgaaaaatgtaggggagaagtttaggtttgttggattaggaatatgattttaattttaaattagggtagggtgaagtttttttttggatttgatgataagaaagtggggggtagtggtttttataggat

SEQ ID NO: 4092 - DNA, 2397 bp, Artificial Sequence
  chemically treated genomic DNA (Homo sapiens)
gttttgtgagggttattgttttttatttttttgttattaggtttaggaaggggttttattttattttggtttgggattagggttatgtttttggtttagtgagtttaagttttttttttgtgttttttggatatttttgattattattattttttttttaaggtgtataggtgtttgtagtaggaaggaattatggattatttattattagttatgtattttttagtagagaaaatagaggttagatagagaaagagatttgtttaaggttatttagggagttagtggtatagtttatatatagagtttttgggttatattttggaatttattttttgagtttttttgtaatttggtggatttaataagaggtaaatattttattttttgaggtttaaaattaagaatattattgtttgatataatgagtttttttagttttttttttttagtttatttgagtttatatttatttagtttatgtggtttttttattttatttagaatagatagaaatatgggatgtttttttttggggttaaggttaataatttttttgatttttaatttttttgaagttttttttaagggtttgggtgttagaggtaggagggtgatgatggaaggttaatgtttattttagttttttaggggtttgttttggtttttgtttatagagtgtttatattttttgtaaaaattttagttttgggtttagaattagggagttttggtttggttatagtaagtagttagaggtggagagaagatttttggtattagtttatagtttagagttttttaaagttaatgagtgtatgtatgtgtatgtgtgtatgtaggtgtgtattatgtgtgtgagtgtgatgagaaatggagtttaggggtgtgtttatatttttaatttttttttagttttgttttttattttttttaatattttttttttgttttttttatttaggtaaagattaaataagtttttggtttttatttaataggttagatattgtttggagttaaatgttttttgttaagttttgatgttgattgtattttttttgtttatagggtattttttttgtgagttattattggggtttttgtttttttgatattaaaaataaaaaaaagttgtttttatttgtattttagtttagttagtgtattatttggtaattatagtagttttgtttttagtagaaaaatatgaagttttttgggttaatttttaatgttttttttggtaaaggatgatgttatttatgaaatggattgttggttgatttttgaaatttggtaggagtatggattttgaatatatttttagataaggttttgttaggtgtgttggtttaatagagtgtttattatagagatagggaaaaagaaaagaaaattaatatttattgagtgttgggtattatgttgggttttggatttgtattgttttattttgtatgtgggtatttttatttttattttttgatgaggtttttggggttagagtatttttatttattatttgtttaaggttaagtagtttagaaatgggagttaaggattggagttttaagtttgttaatttttaaagttttaatgtttttttatgtttggaaatggtttaaagttgatgttgtttatagttagagagtttggtttttggaaaataaattatttgtttatgtttatttagattttttttttgaatattttattggttaggaaaaggtttttggaagaagggtttttttagttaatgtatgtatgatatttatgtttgtaaggttttgttttgttttttttagggtttttgttttttttttttttgtttgtaattgtattgaaaatagttgtaatttttatagaaattattattattttttgagaaaatatattaagtatatgagttattgatgaagtggagaatttttttaatttttttaaatatatgattttagggtggggagaaaataaatagggttttggatgaagttgttagattattttattttttttttttttgtttaggttattttttttgggtttttgtttttttatttgtaatatgggattgaatttattgttttatttattggagtggtattgtttagtatgtgttagtgataatattagtgttaaggatgtaaaataaagttaggggtgtttttgttttgttagtaggtttatgttttggtttttgtttgttggtttttttatatgtaaattttatttaatttgtgtgatattatttttttggatttatgatttttgttttttaggtgaagaatatgagttttggaattatttaataatttgttagtatttagtatttattttgttaaaaaaaaagtattttataaagtttgaatgaatggatgaatggatgaatgaata

SEQ ID NO: 4093 - DNA, 2466 bp, Artificial Sequence
  chemically treated genomic DNA (Homo sapiens)
tttagatgttagtagttttttttatttttaggtatgttaataaaaatgtttttagatattgtaaaatggttttttttttgggtaggtagaattgtttttattattggtatagttaggtaaatgtaatagtttaatatttagtagatattattatgtgtttagtattttaaatatagttttgatttttataatattaataaggtagtgattattttttttgttttataggtgaggaatttagggtttagaaaggttaattttaaatttgtaaaataggtaaagggaataggtgggatttgagtttagttttttagtttgttgagagtatgtttttttttttatttaatttggttgtttttttttaatagtaaatgattggttaaagttttgtaaatgtttaataatagggaattggtttagtaaattatagtgtattttttggatggaatattatgtagttattaaaatgatggagggttattaaaaatgaaaattatgtaatgatatggaaaaatgttaattggattatattaagttaaaaaaattagaaaataaaaatgtgtttatattgtgattataatgatgaagaagtatatttatgtgtggatggtttatgtgttggattgaggatattaaggataattttttttttttttttgatatttattattgttattagagtgtttttatgattttaatttttaagtagtagtagagtaatgataagatttaagatgttaggtttgttttaggttttttttttatttgaattagaatgaagatttttttaaattttgattatagtaaggggttgatttatttttatttttttttttattagtattgttgtatgtatgtttgtgattttaggtttttttttttgtattgattagttttttttaagtatagaaagttggaagtatagaagaaaataattttgaaggtattggtgtgaattattttgggagttagggttattaggaatatatagttttagagtagtagatggtatttgtttgttatagggtattgagtggtgtattgttttatgtattatgtattaagagtggtttagtattttggtttggttgtgtgggataagttttgtaaaagaaatatttgatgaattgattgggatgttaaaatgttattaaggataaattaatggatgtgttattttggttgtaagaggtagtgttagtaagataatagatagttggtgggttgttttttagtttaagatagatggtgtttgtaatggagatttatggtttttatgtaatgtgaggtgttttgtagggagaagaataaatagaaatgttttagtatttaagtgttataaaattataagtatgagattaattaattagtgtatattaggaaggtggttggtttgtttgtgtttttggggaaagttagaatggatggtattgggttagagatgatgggtttttgtattagttttttaaagaaaagtaattgaatttaatgtgtaattataaattgttgttgatggaaagataagtttggttggtgtttgtttttttagggatattatttttgtttattgttttaaatattttgtgtttgtgggttaagtatttgagaggattggggagatttggaaattagttttgtttataatgttatgtgggttatgaagggtgttataattttaatatatagagtaatttttagggaagtttgattttttttgtgtttttttagatagggggttgtttatttttttgtgataggaggtttattattttttttttaatttgatttagtgttagataagtattgttagagagtttttttttagatttttttagtttttttttttttataatttaataataataaagataagaaggagaatagttaatgtttattgagtgtttgttgggtgttaggtattgggttttggttaagttataatgttattatgtattatttttattttgtagtgtaggaaaaagaagattagagggtgtgaaagatatgttgaagattgtatagttagtatatggtagggttaagatttaaatttggggttgtttgaggttagggtttgatagtttaattattatatggttttaagttttgtaattattattaattggatggagtttggtttttagagtaatatagaatatgataaggtaagatagatgagaatttatatgtagtatatattgggtattgttaagtatttggtttgggttagtttaatatattgtttatgtagtagttttttttgagtaatgaaattatttttttatttgagatatttatttttttatttttttaaaaaagttatatatatatatattttttaatatataaaaattggttttatttttgtgtatttataatgaataattagaatttgaatttttataaatagtataatttatagtagtatttaaaaaagaaatatttagatataaatttattaaaata

SEQ ID NO: 4094 - DNA, 2466 bp, Artificial Sequence
  chemically treated genomic DNA (Homo sapiens)
tattttggtggatttatatttgaatgttttttttttgggtgttattgtaaattgtattatttatgaaaatttagattttaattgtttattataaatatatagaagtgaaattgatttttatatgttgaaaaatatatatatatataatttttttaaaaagataagaaaatagatattttagatggggaaataattttgttatttaaaaaaggttattgtatgaatgatgtgttaggttgatttaggttaggtgtttagtagtgtttaatatgtgttatatgtgagtttttatttgttttgttttgttatattttgtattgttttaaaagttaggttttatttaattaatggtagttataggatttagaattatgtgatagttaagttgttaagttttggttttaggtagttttgggtttggattttggttttattatatattagttgtgtgatttttagtatgttttttatattttttggtttttttttttttatattgtaaaatggagataatatatgataatattgtaatttgattagagtttagtgtttggtatttagtaagtatttagtaagtattagttatttttttttttgtttttgttgttgttaagttataaggaggaagaggttagggaagtttaaggaagaattttttaataatgtttatttaatattgggttaggttgaaagggaagtggtgagttttttattatagaagaatggataattttttatttagaaaggtgtagggggagttaggtttttttgagagttgttttatgtgttgagattataatattttttatagtttatatggtgttataagtagaattagtttttaggtttttttagtttttttagatatttgatttatagatataaagtgtttgaagtagtaggtagaaatagtatttttgaaaaaataaatattgattagatttatttttttattagtggtagtttatgattgtatattaaatttaattgtttttttttaggaggttggtgtagggatttgttatttttaatttagtgttatttattttagttttttttaggagtgtagatagattagttgtttttttagtgtatattaattaattaattttatgtttgtgattttatggtgtttaagtgttggagtatttttgtttatttttttttttgtaaagtattttatgttgtataaagattatgaatttttattgtaaatgttgtttgttttgggttggagaatagtttattggttgtttgttgttttgttggtattgttttttatagttaaagtaatatatttattaatttatttttaatgatattttgatattttgattagtttattagatgttttttttgtaagatttgttttatatagttgggttagggtgttaggttatttttgatgtataatgtatgagatagtgtattgtttagtattttgtgatagatagatgttatttgttattttaagattgtatgtttttaatagttttggtttttagagtgatttatattaatgtttttagagttgtttttttttatgtttttagttttttgtgtttgggagaagttggttagtgtaaggagaggggtttggggttataaatatatatgtaatagtgttaataggagggaaagtaagggtaaattaattttttgttatagttagagtttagagaagtttttattttaatttaggtggaagaagggtttagggtaaatttaatattttgaattttattattattttgttattatttagaaattaggattatgaagatattttgataataataatggatattaaagaagaaaggaaaattatttttaatatttttaatttaatatatgagttatttgtatatagatatatttttttattgttgtaattataatgtagatatatttttattttttagtttttttaatttaatgtaatttagttagtatttttttatgttgttatatggtttttatttttaatggttttttattattttaatggttgtataatattttatttaggggatgtattataatttattgaattagttttttattgttagatatttatgaggttttaattgattatttgttattaaagaaaggtagttaagttgggtgaggaggagagtatgtttttagtaggttgaagagttaggtttaaattttatttgttttttttatttgttttatgagtttaggattaatttttttgggttttgaattttttatttataaaataaaagaaataattattattttgttagtgttgtgaaaattggagttatgtttaaaatattaagtatatggtagtatttgttaaatgttaaattgttatatttatttaattatgttagtagtaggggtaattttgtttatttaaaaagaaaattattttgtaatgtttagagatatttttattgatatgtttgggagtagggggaattattggtatttaga

SEQ ID NO: 4095 - DNA, 2496 bp, Artificial Sequence
  chemically treated genomic DNA (Homo sapiens)
taattattatggaattttagaattattggaggagtaggattttttaaaatttatttttgtgattgttattggatgttaaaattttttgtatatttttatttagtggttatttagtttttgatagtttttaggtttgaaattttattttgaaatattaagaagggaagttgtgtttattatttagatatttatttttattttatttttttgaagaaattttttttgtttgtttttttagttattttttaatattttgtttgattttgtttttttaatagatgtgttaggtgttgatttaggtatggaggttttgattgtgatgttatgtagtttatttattgttatttagattgagttggtgagtttatttatttaatttgttaaaattagatttggtggaaagtgaggattttaatatttttatatttgttgataattttaaatttttattgaagagtgggaagttgttgtttggaattatattaagattaataatgataatagagataatgataattgtaaatatagtaatttttttatttataatggtagttttgattgtataaagaatttagtattaggaagggatatattttaagttattttggaattgttttttaatttgtgggataaagatagattaaatattattttgtattttttaaattttgaataaataggtaaatagtttttttgttaagtaggagaaaatattgggaggagatgagtttaggttttttaatatgtttttattttattggttagtaggtttatggtttagagagaggttgaagttggagatagggattttagaattatttgtagagttttttggttgaggttttgggaattaatgaaattgtagtattagagagtattggaggagaagggaagtggggagttgttttagagaataagttagaatagaaatagttaagatagttaaagtaggagtatttggagattaatgtgaagggaaagaagtgagagatatgtggaagaggtggtaatttttgttaaaggggattaagaataaggagttttaagaattttttgtagggttgttggttggagatgttgtttttatgtaaattttatttgttgttgttaatttagattttgttttattatgattatttttgagaaatagatttaagatatgaaaaaaaattttttttttgtaaaattggtttgtgaaatagattataggtattaatattttttatgagtgataatttagggttaatatttatattttgtaatgtttgtttttttttttttgggatagaaaagaatgttgttaatattaatgaataaatattaataaaattaaatataattttgttttatttggaattaatttttaaaaaaatttttaatatttgtatataatatatatatatttttatgtataatagggaaattagattttgtttgagagatgtgtatagtatttaatgttaatttatttggttttattttttttttagattgttttagaagggtagtgtttttagaattgagattttgaattagttttttttgatttttaggtatagaatgtttagtttaagttaagatatattaaatatttatttatttttagatttttaaaaatttagttttttgtttttttttgtagttgattttttttggtagaaatttagttttaaattgggagaaatgagtggattattagaattaaagttgatgttagtggtattgtgggttggtgtatgatgtgggaattttgataaatagaaatgaatgtttataaatgttagattttaggtttgtaaggaaagattttgttgtattttataaatggatttgttttttaatatgttttttgttttaggataagtaatgttggttagaattttgggggtgaatttaggggtttgtattatttggggttgtgttgttatttttgtttttagtattgtagaggttaaattgtatttagatgagattttagggaaagagaaaagaattttgggtatgggggttattatttaaagaatttggtgtagtgtgtgggagatattgtatgtatttttaatttagatatattattaatttatattattttttttgtgtttattaaattaggattttttagttttattattattgatattttgggttagaaaattttttttttgtggaattgtttagtgtattgtaggatgtttagaagtatttttggtttttatttagaagatgttagtagtattgttttggttgtgataagtagaaatgggtttagatatggttaaatgttttttggtgagagggtagtaaaatggtttttggttaagaattattgtagtgaattatttaagggattatgagtgaagttttgaataatttatatttgagttaagtggtgttagagagatatttgtaggattttagttttgttagtttgatattttttttataagtttattgattggagattttaagtatgttgtagtttttatttaatagatt

SEQ ID NO: 4096 - DNA, 2496 bp, Artificial Sequence
  chemically treated genomic DNA (Homo sapiens)
gatttgttaggtaggggttgtagtatgtttggggtttttagttggtgggtttataggagagatgttagattaataaagttgaggttttgtaagtatttttttggtattatttagtttaggtgtggattatttaaaattttatttatggttttttgaataatttattgtagtagtttttaattaggggttattttgttatttttttattagaggatatttgattgtatttggatttatttttgtttgttataattgggatagtattattggtattttttgggtagaggttagggatgtttttaaatattttatagtgtattgagtagttttataagaaaagaattttttggtttaaaatgttaatggtggtgaggttgagaaattttggtttagtaggtataagagggatggtgtgaattaatgatatgtttgagttagaggtgtatgtagtattttttatgtattatattaggttttttgaataatgatttttgtgtttaagatttttttttttttttttggggttttatttgggtatagtttggtttttgtgatgttgaggataggagtgataatgtagttttaagtggtatgagtttttaggtttatttttagagttttgattaatattatttgttttgaaataggagatatattaaaaagtaagtttatttgtgaagtatagtaagatttttttttgtagatttgagatttaatatttataaatatttatttttgtttgttagggtttttatgttatatattaatttatagtattattgatgttagttttgattttggtgatttatttattttttttagtttgaggttgaatttttgttagaggaggttagttgtaggaggagatagaaagttggatttttgaaaatttgggagtggataaatatttgatatgttttggtttgagttggatattttgtatttgagagttagaggaaattaatttagaattttaattttagggatgttatttttttaaagtagtttggagaaaaggtggaattaaataaattggtattaaatattgtgtatattttttaggtaaaatttgatttttttattgtatatagaggtgtatgtatattatatatagatgttaagaatttttttaaaggttgattttagatggaataagattatatttgattttattaatgtttatttattgatattggtaatatttttttttgttttgagagaaagagaatgaatattataaagtgtaaatattggttttaaattgttatttataaaggatattaatgtttgtagtttgttttatgaattaattttatagaaagagggtttttttttatgttttgagtttgttttttagaaatggttgtggtgggataggatttggattgatagtggtaaatgagatttgtatggaggtagtgtttttaattaatagttttgtagaaagtttttagaattttttgtttttaattttttttggtaggagttgttattttttttatatgttttttatttttttttttttatgttggtttttggatatttttgttttggttgttttgattgtttttattttagtttgttttttaggatagttttttatttttttttttttttggtattttttggtattgtaattttattaatttttaaggttttaattaagagattttatagataattttgaaatttttgtttttagttttaatttttttttgaattatagatttgttggttaatgagatggaaatatattgagaagtttaaatttgtttttttttaatatttttttttatttaataaaggggttatttatttatttatttaaggtttaaaaaatgtaaagtggtgtttgatttatttttattttatagattaggaaatagttttaagatagtttaaaatgtgtttttttttggtattggattttttgtgtaattgggattgttattgtgagtgggagagttgttatatttgtagttgttattatttttattgttattattaattttaatgtgattttaagtaataattttttattttttgatgagagtttaaggttgttagtaaatgtggaaatattgaggtttttattttttattaaatttggttttaatagattagataaatgagtttgttagtttagtttaaatggtaataagtaagttatatgatattatagttagaatttttatgtttgggttagtatttaatatatttattaagaaggtaaagttagataaggtattagagagtgattgagagggtagatagggaaggtttttttagggaggtgaaataggagtgggtgtttgagtggtgaatatagtttttttttttaatattttagagtagagttttaagtttggaggttattagaggttgggtgattattagatgaagatgtgtggaggattttggtatttaatagtgattatagagatgggttttgggggattttgtttttttagtgattttgagattttatgatgatta

SEQ ID NO: 4097 - DNA, 2474 bp, Artificial Sequence
  chemically treated genomic DNA (Homo sapiens)
tttggaattggatgttattaatataaagagaaaaatgtaaaatggtaagtagtaagtatattttagagtgataatgaaataagggtttttatttttgtagtattggttagtttgtttttatttttattttttttaattttttttttatagggatttttttaaattttaaatttgattaagtttgttttatttggatttattttaggttttttgttgttttgagaatagaatttaatttttaatttggtttttaggttttttttggattagatttttttatttgtttggttttttttttgttttgtatttaatagttttgtataattttttaatttttttagtttggttaagttaatttatattttagggtttttgtataggttaaatttttagttaagaatgttttttgtttttttagatttttattttgttatttattaatttaatttatttgtttgtttagaaaggtttttatttattttttttagttttttgtaaataggattaatttggttttttatagagtataagtttttattttattgtattgtaatttttaaatatatttatatgtttgtgggttattttatttttttttgaattttttgataataaggattggaatttaattatgtttttttagttttgagtatggtgttgggtataaagtaggtatatagtgagtgttttttggtttattgattgattgattgattaaatttattttttttaaattttttaatgtgagaatatattttttttaaagtttttagttattataaatgatagataagatgtttttttgaatttttaaatgtttattttaaagtttttagttttgtttattagtttatgttattaattggatgagttttagtaaggtttttgttaaagtatttttttttttgttgatttattttaaaatgtaatttagtggttttaagttagaagaagaagaggttatgtttttagtttttttttaagtatttattattagttagttgagaagatgtgattgttatttttttaatttgataagatgattttttttaattataatataagtttagtgagttatataattatggtgaattttttattagtttaatattttatgtaattttttagagaatatgattttatttgaaaatatatgtaatagtttggaatttatttttttttagtgtttaatttttagatttttataaatattagatggttttttaggtagtgatatatgttggaattattgaataagtattgtttatgattttgttttgggtagtgttaaaaggtattgagaatttatttattttattatggtgttgttaatagggttttaggtagtttgttgggtttggaggtgtgttaaattgtagtgttatgaatgttttaaatgagagatagagaaagagaaagagaaggaatatgtgaatgtgtgtttgtagttgagggaaataataagagtaaagggaattaaatttttttaataaaggaaaatagtttttaaataaagaaaaagaagtttaatggttagttattgttgtataataaaatttttttaaaattgagtagtttaaaatagtatatatttattattttatattttttgtgggttaggaatttaggtagagtttagttgggttttttttgttagtattttataaggttgtaattaagatgtaggttagggtgtggttttatttgaaggtattattggggaataatatgtttttaagtttatttttagggttgttggtaggatttagttttttaggggttgttggatagagatattagttttgaattattgattagaggtattttttagttttttgttttgtgagtgttgttatagagtgttttataatatattagtttgttttattagtaagtaaatgagagggtaagagaaagtattagtaaagagagaatgttagtaagatgaaagttatagttaagtatggtggtttatatttgtaattttagtattttgggagattaaggtaagtggattatttgaggttaggagtttaagattagtttggttaatatggtggaattatgtttttattaaaaatataaaaaaagaaaaaaaaatttgggtatagtggtggtgtttgtaattttagttatttaggaggttgaggtaagagaattatttgaatttaggaggtggaggttgtagtgagttaagattgtattattgtattttagtttgggtaatagagtaagattttattttaaaaaaaaaaaaaaaagttataattttttgtaatttaattttggaagggtgttttattgtttttgttataatttttttttttttttttttttttttttttttgtttaagttggagtgtagtggtatgattatagtttattgtaattttatatttttgggtataagtaatttttttattttagttttttgagaagttgggattataggtatgtattagtatatttggtta

SEQ ID NO: 4098 - DNA, 2474 bp, Artificial Sequence
  chemically treated genomic DNA (Homo sapiens)
tagttgggtgtgttggtgtgtgtttgtagttttagttttttaggaggttaaggtaggaggattgtttgtgtttaggaatatgaggttatagtgagttatgattatgttattgtattttagtttgggtaaaaaaaaaaaaaaaaaaaaaaaaaaaaaaattatggtaaaagtaatgagatgtttttttaagattaggttgtaaaaggttgtggtttttttttttttttttgagatgaagttttgttttgttgtttaggttggagtgtagtggtgtaattttggtttattgtaatttttattttttgggtttaagtgatttttttgttttagttttttgaatagttgggattataggtattgttattatgtttagatttttttttttttttttatatttttaatagagatgtggttttattatgttggttaggttggttttaaatttttaattttaggtgatttatttgttttggttttttaaagtgttgggattatagatgtgagttattatgtttggttatggtttttattttgttagtattttttttttgttggtgtttttttttatttttttatttatttgttgatgaagtaagttggtgtgttgtgagatattttatagtgatatttataaggtaagggattgaaggatgtttttggttaatagtttagagttaatatttttgtttaataatttttgagaaattgagttttgttaataattttgagagtgagtttagaagtatattattttttagtgatgtttttagatgggattatattttggtttatattttgattatagttttgtgagatgttgatagagaggatttagttgagttttgtttggatttttgatttatagaaaatgtgagataataaatgtatattgttttaaattgtttagttttagggaaattttgttatgtagtagtagttaattattagatttttttttttttgtttgaaaattatttttttttattaaaagagtttaattttttttatttttgttgttttttttagttatagatatatatttatatattttttttttttttttttttttgttttttgtttgaggtatttatggtattgtaatttgatatatttttaggtttagtaaattgtttgagattttgttagtaatgttgtaatgagatgggtaaatttttagtattttttgatattgtttaaggtaaagttataagtgatgtttgtttgataattttaatgtgtgttattgtttggaaggttatttggtatttataggaatttgaaagttaggtattggggaaaaatgagttttagattgttgtatgtatttttagatagaattatattttttgaaaaattgtataggatgttgagttgataggggatttattatgattgtatggtttattgggtttgtattatggttgagaaaaattattttgttgggttgggaggatgatagttatatttttttagttggttggtgatagatgtttaaggagaggttgaagatgtggttttttttttttttgatttgaagttattgagttgtattttaaagtaaattaataaaaagagggatgttttgataggaattttgttgaggtttatttggttggtggtatgagttggtagataaaattaaaagttttgagataagtgtttggaaatttaaagagatattttgtttgttatttataatggttaaaaattttgaagaaaatgtatttttatattgaagggtttgggggaggtgagtttagttaattaattaattaatagattaggaaatatttattgtatgtttattttgtgtttggtattatgtttgggattggaaaaatatagttagattttagtttttgttattaaagggtttagggaagagtgaggtggtttataaatatgtaaatatatttaaaaattgtaatatagtgaagtgaaggtttgtgttttgtgggagattaaattgattttatttgtagggaattagggaggataaataaaggtttttttgagtaggtaaataaattgggttggtaggtggtaggataaagatttaggggagtagaagatatttttggttgaaggtttggtttgtgtaaaggttttgaggtatgaattagtttggttaggttggaggaattgaaaagttgtgtaaggttgttgggtgtaaggtaggaaagaggttagatagatgggggagtttggtttagaaagagtttgagggttagattaaagattagattttgtttttagagtaatagggagtttgggatgggtttaaatagggtaagtttggttagatttggggtttggaaggatttttatagaggagaggttggaagaggtgagaatgagggtaggttgattaatgttgtaaagatgaggatttttgttttattattattttgaagtatatttattgtttgttattttgtatttttttttttgtattaatagtatttaattttaaa

SEQ ID NO: 4099 - DNA, 2460 bp, Artificial Sequence
  chemically treated genomic DNA (Homo sapiens)
ttttgggggatttatgttttatagaaagtatttagtataatgtttggtatattgtaagttttaagtaaatagaagttgttattattattaattattttttgagatggagttttggtttgttttttaggttggagtgtagtggtgtaattttggtttattgtaatttttattttttgggtttaagtaatttttttgttttagttttttaagtagttggaattataggtgtttattattatatttggttaatttttgtatttttagtagagatggggttttattatgttggttaggttgtttttgaatttttgattttaggtgatttgtttgttttggttttttaaagtgttaggattataggtgtgaattattgtgtttagttaggagttgttattattaatagttattattgttatagttatttggtaaattaagtatgattgttattattttgtagatgataaaattaaggtaataagatgggagtgatttgtttaggtttatttaattgggaattatgtgattagaagtattttttttttattatgtatttttgtttttttaattgggtatgtaagtttatttatttatttatttggtaaatatatatgtttattgtgtgtttggtttgtgtgtgttgtaggtatagattgggttttgtttttatggaaggtatagttttttagggaagagtgatttttattgaatatttatatagatttatttaaaaattataatatgtgttttgtggtatgaagggaaaagtagggtgttgtgagatgtgatttggtttggggtgatttagatggggaagtttttggtgagtttggttaattttttgttgttttggatatttagttattatttttttagattagtttagggttggatgatttttgagagtgtggttgggtgttttttttggtatttttgttttttagtgttggttttttaagttttttttagattttttttttatttagtttttttgaagattgtttttttataattgttttttttattgaaggatttagatataaattgtattttaaatttaatattagttattaatattttatgattataaaatgttaaagataatgttagtggaaggagtgtttgtatgggtagaatggatgatttagaagtttggggagaggggagttggtatattaagtggtttgggagtttttgaggtaatttagtatgataggtggtggtttttggttgagtgtaatattttttgaggtgtttattaagtgttgttgttgtgtataaatattttttttttgatttttgttattttatgtttattatgattaggagtaggtggggttattatgattttttgagttttttttttgtttttgaggaagttaaatggatgttttggtaggagggtatggggttgggtgggtagatttgatggttatgtatttggggttttggttggtttttgggaagttggaggttttgggttaagtttgtttttgttaggatttgttttgtgattttggggttatttttgtttttttttgagtttttgtttttttatttgtaaaatggggataataagtttgtttttattttatggagatggtgaaaaggaagagtgggttagttatttgtggtagttttttttttttgagatagagttttgtttgttgtttaggttggagtgtaggggtatgattttggtttattgtaatttttgtttttgggtttaagtgatttttgtgttttagtttttttagtagttgggagtatatgtatatgttattatgtttagttaatttttgtatttttagtagatatggggttttgttatgttggttaggttggttttgaatttttgaatttaagtgatttgatttttttggttttttaaagtattgggattataggtgtgagttattgtgtttggtttgtgagagtttttgattttgtgttagtattagggaaataggattggaggggtagttgaggagagttgggttttggagttaggtaggttggggttgggaatttggataaatgattttgttttgttgagttaggttttttatttttatagtgaagatggtagtagaatggatattttttaggggtgaagattttatgagtttattataagaaagggtttggaatagagttaagatttatagatattattaattgagtatttattaagtattaattattaggttaagttttttttatgagttatgttgtttgatttttttattagttttttgaagtaaaattatttttttttttattaattaatattttgggtgaggagtgggtaggggttggggattatagtttagagaaggggggttttgagtttagtggttagttttttttttttagagatatatttttttttttatagttagttattggggttgatggatgggatgggggtggggtttagatagtagagagtgtttagaaaag

SEQ ID NO: 4100 - DNA, 2460 bp, Artificial Sequence
  chemically treated genomic DNA (Homo sapiens)
tttttttgggtattttttgttgtttgagttttatttttattttatttattaattttagtaattgattgtggggaaggagatgtatttttgaaaggagaagattagttattgggtttgagattttttttttttgagttgtgatttttagtttttgtttattttttatttaggatattaattaatgggaaaaggaatggttttgttttagagagttggtgggaggattaaatagtatagtttatgggaagaatttagtttagtggttggtgtttagtaagtgtttagttgatggtatttgtaggttttgattttgttttgggtttttttttgtgatgagtttatgaaatttttatttttaaggggtgtttattttattgttatttttattgtggggatgaggaatttgatttagtaaggtgaagttatttgtttaggtttttaattttagtttgtttgattttagagtttggttttttttagttgtttttttagttttgtttttttggtgttggtataaaattaagagtttttataggttaggtatagtggtttatgtttgtaattttagtattttgggaggttaaaggggttagattatttgagtttaagagtttgagattagtttggttaatatggtgaaattttatgtttattaaaaatataaaaattaattgggtatggtggtgtgtgtatatatttttagttgttggggaggttaaggtatgagaattgtttgaatttaaaggtagaggttgtaatgagttaagattatgtttttgtgttttagtttgggtaataggtaagattttgttttaaaaaaaaaaagttgttataaataattgatttattttttttttttattatttttatgagatgggaataaatttattatttttattttatagatgaggaaatagaggtttagggaagaatagggatggttttaagattatagagtaagttttggtaggggtaggtttgatttaagatttttggttttttaggagttagttagagttttaggtgtatggttattgggtttgtttatttagttttatgtttttttgttaaagtgtttatttggtttttttaaaaatagaagggaaatttagagggttatggtggttttatttgtttttggttataataaatatgaggtgataagaattagaggggaaatatttatatatagtggtggtgtttggtgagtattttggagaatgttgtatttagttaggagttattgtttgttatattggattattttaaagatttttgagttatttagtatgttggtttttttttttttgaatttttgagttatttattttgtttatgtagatgttttttttattgatattatttttaatgttttgtaattatgaaatattaatgattgatattgaatttaaagtataatttgtgtttgaattttttggtggaaagggtagttgtaaagggatagtttttaaagagattgggtggggggggggtttaggggagatttggaaaattaatattgggaggtgggagtgttaaggggggtatttagttatatttttaagagttatttagttttaagttgatttggaggggtaatagttagatgtttaggatagtaaagggttaattagatttgttagaagtttttttatttgggttattttaggttaagttatgttttatagtattttgtttttttttttatgttatagagtatgtgttatgatttttagatgggtttgtgtgagtatttagtgaagattgtttttttttgggaaattgtattttttatgagggtagggtttagtttatatttgtagtatatataggttaggtatatagtaggtatgtgtgtttattgaatggatgaatgaatgggtttgtatgtttagttggaaaaataggaatgtatgatggagaagaaatgtttttagttgtatggtttttagttgggtgggtttggataggttatttttattttgttattttggttttgttatttataaaatggtgataattatatttagtttattagatagttgtgataatggtaattattaataatagtagtttttggttgggtatggtggtttatgtttgtaattttagtattttgggaggttgaggtaggtggattatttgaggttaggagtttaagagtagtttggttaatatggtgaaattttatttttattaaaagtatgaaaattagttgggtgtggtggtgggtatttgtaattttaattatttgggaggttgaggtaggagaattgtttgaatttaggaggtggaggttgtagtgggttgagattgtattattgtattttagtttgggagatagattgagattttattttaaaaaataattaataataatagtagtttttatttatttaaagtttataatatgttaggtattgtgttgagtgttttttataaaatataaattttttaagg

SEQ ID NO: 4101 - DNA, 2410 bp, Artificial Sequence
  chemically treated genomic DNA (Homo sapiens)
tttttatggtataaagttatttaaaaaaaaaaaaagaatagaggggagttagagggaggggataaggggtggagggtggagttgttagagttttatggggtataggagataaatggatatgtattggttggaaaggatagaagttgtgatttttttagttatttaattggggaaattttagaataggaggtttttgagtttttattagttgataagtgataaaagttgagagtaataatgataagtgttaatattgattaagtgttaggtatatgttaggtaattatatagagtatgttataggtatgaatttatttgtttttttaagaagttttttgaagtggtattgggagataattttttatgggtttttttaaggtttgtatgtttttagtttaaaagatattgagatttttgttttagattattattttaaggatatttgtgtagtaaatatatttggaggatagagataatatttttttttggagtagaaagaagaggatagagttgttttttaattagtataataatgtttttatttgaggtaaaggttagataggtttggtaatagtttttttataagattgtaggttttttaagttttgggattttttattgagatatagatttgttgttgtgtgtgtagaatttatttgggttgtttttattgtttttatggaatttgggagataattagaattgatgtaaatatgaagtttgtgttgtttgttatattgtgattaataaagttttttgtttttgatttgggattttgtgttttttgttgttatgtatggtattgtggtaggttaatttattagtttgtgagtagtgtaaaattttggattttttgtagtttttttgttatatttatattatttttgttttatagatgaggattttgaggtttagagaattgaagttttttgtttaagattatatagttaataagtaataaagttaggattgttatttagattgattgggaaaggaaggagagatgagtaggggattggagaagagaattgttggaaatgataggagttgaaggttttaaaggtatatagaaggttatgttttttagttttttaaatttatatatttttagatgttgtttgtttttatatttggttgttggggttgagtagttaatttgggatgattgtgatatatttaatggtgagttatgtttttttttagtaattagtagtggtaggtttgggaggatgtagggagtatttttggaaatttgtgtttgagggttgttatgataatgttatttgagttgtttgttagtagttgggatgttagtgtttgaattaaggtataaaatagttttataggttgagtgtggttgaggataggagtaggttttttgtatggtatttttaatgggtttgttagggattgatgggagggatgtgaggatttggtgataagggagatttatgggtttattgtttaggttatagtattttatggaagtttggggtttttggttggtgggaatgagtatatttggtgtgatgggtattttggtgagtattatttttttttgttttggttttttttggtttgtttgttttatagttgtttttttagaggttttgtttaatttgaggtttttatttaagtgttataatttttgaagattgatagtaatttgggaaggtaattaagattattttttaggataattttgaagattttagaatttagggtgaattagttatatttatatattaatattaaatatgaatattttatgaaagtagtttggaatttatttatttatttataaatttatttattattttgtttttttagttgtttattttaattagaatttgggttttataggttttatgtagaagtggatttggttattttgtttttatttttttttatttttttttttttattttattttagtttattagttttattgttgttttttaaatatatagttgtttttttgttttagagtttttgtatttgtttttttatttgtttggaaagttttttttttagaagggaagttttttttttaggtttttgtttatatgttatttttttagagatatattattaagattattttaggagaaagtatttaatttagttttagtgataaggttaaatatatatatatatatatattatgtataatatgatatatatttgtgatttagttttttttatttgtatgaagtaaagagagataagttgaaaattggtggtttgtaagttgaatttaatttatagatttgttttgtttggtttatatagtgttttaagaattgagtaagttgttaatagttataaagttgagagattttgttttagaatgtaaatttttaatttattttgaaaaattaaggttgggtgtggtggtttatgtttgtaa

SEQ ID NO: 4102 - DNA, 2410 bp, Artificial Sequence
  chemically treated genomic DNA (Homo sapiens)
ttataggtatgagttattatatttaattttagttttttgagataaattgaaaatttgtattttaaaataaaattttttaattttataattgttagtaatttgtttagtttttgaaatattatgtaaattaaataaaataggtttgtgagttagatttaatttataggttattaatttttagtttgtttttttttgttttgtatggatgggggaaattaagttatagatatatgttatattatatataatatatatatatatatatatttggttttattattgaggttgaattaggtgtttttttttagggtggttttggtagtgtgtttttgagaaggtgatatatgagtagaaatttaaagggagagttttttttttgggggaagagttttttaggtagatggaggagtaagtgtaaaggttttgaggtagaaaagtaattgtatgtttgaggaatagtagtaagattagtgagttagagtagaataagagagggggagtgaaaggggatgaggatgggataattaaatttatttttatatagggtttgtaggatttaggttttaattaaaatgaataattgagaggataaggtgatgaatggatttatgaatgaatgaatggattttaagttgtttttatgggatatttgtatttggtgttagtgtgtgggtgtggttgatttgttttaggttttgaagtttttagaattattttggaagatgattttggttatttttttaagttgttgttagtttttagaggttgtgatatttggatagaagttttaaattgggtagggtttttgggagagtaattatgagatagataaattaagaagaattaaggtaggaagagatggtgtttattaaaatatttattatgttaagtgtgtttatttttattagttagggattttaggtttttatagagtattgtgatttggatagtgagtttatgaattttttttgttattaagtttttatattttttttattaatttttggtaaatttattggggatgttgtgtagggggtttgtttttgtttttggttgtatttagtttgtgagattattttgtgttttggtttaggtattggtattttagttgttggtaagtgatttagatggtgttgttatggtgatttttaggtatggatttttagagatgttttttgtatttttttgagtttgttattgttgattgttgggggagagtatgatttattgttaaatatattatggttgttttaaattggttgtttagttttagtagttggatgtagggataggtagtatttgggggtgtgtgggtttgggaagttgagaggtatgattttttgtgtatttttggggtttttagtttttgttatttttagtggtttttttttttaattttttatttatttttttttttttttttaattggtttgggtaatagttttagttttgttatttgttagttgtgtgattttgaataagaagttttaattttttgggttttaaagtttttatttgtaaaataggggtgatgtgagtatgatggaagaattatgaagggtttgagattttgtattgtttataagttaatgagttagtttgttataatgttatatatgatggtagaagatatgagattttaggttagagataaaggattttattagttatagtatagtaagtagtataagttttatatttgtgttagttttaattgttttttaagttttatgagagtaatgaaaataatttaaatggattttgtatatatagtagtagatttgtgttttaatggaggattttagagtttaggaaatttgtaattttataaaggggttattgttaaatttgtttagtttttgttttagatagagatattattgtattggttgggaaataattttatttttttttttttgttttagagagagatattgtttttgttttttaagtgtgtttgttatatagatgtttttgagatgatagtttagaataaaggttttagtgttttttgagttgaagatatgtagattttggagagatttatggagaattattttttaatattattttaaagggttttttggaggagtagatgggtttatatttgtaatatgttttgtatagttgtttggtatgtgtttggtatttaattagtgttagtatttgttattattatttttagtttttattatttgttagttagtaggaatttagaggttttttgttttgggatttttttagttaggtgattaagaaaattatagtttttattttttttagttagtatatatttatttattttttatgttttatgaagttttaataattttattttttattttttgttttttttttttgatttttttttgttttttttttttttttaaatagttttatattataaaaa

SEQ ID NO: 4103 - DNA, 2489 bp, Artificial Sequence
  chemically treated genomic DNA (Homo sapiens)
aaatggttattaaattgtttaatttaaatggttggtttatggatatgttttgtttggtttatgtttgtttaatttttaaaaaaaaattattatttgtattttttgttaataataaaaataattgggatagtgtgttttaatttaaattttttatttttttttggtaattagaaggtttgatagtattgtgtttatttttttgtatggtagttatttataggagttgggtagtggttgttttttttgttaggatataagtgttttattttattttagtgtttttttggttatattatttttgtatagggttgtttggttttagtttagttgatgggatataggtgtgagtagtgaggttatgtagggattataagtaggatatttttttttttttttggaaggaagtattttggttattatagtaatatgttgttgtttgtaatatattttttatttgaaaaggagaggagatgataagtatatttttttttttagtttaggtaatattagtttttggtattttttaaaatttaagagtgagaagggggagtgtgatttgttttttttaatttgggttttaaatgtagatgttttaaatatttttatttgtttaattaatttagagatgaggtgttgggaggggttgatttagattttattttatataaaaagattagaatatttttgattagtgatggaggaaggtgtgggagtttgagatagtgttttgtttttgggtaaatgtatatattttttgatgttttttttttttttatgttttttaaagtagaagtatagattttttttttttattattttttatagttaaattttttttagttaggattttagattttttttaatatttaggagtttttagggtagtaggtttgtttttaggttatttatagaatttgaaggaaataagggaatgaaataagagaattagttagaaataaggtagggtattgtgtggtatttttttttgaaattaagaggttgagagttggaatagtagtagaaattagaagaaattttattgagaaaagaggtatagagaggagtgttaattagtatttaggtttttttttgggagtgttaatttataaatattaataattgtaattatttagtattagttataatgttttgtaaattaaggttattttttgtggagtaaatagttgtgttaatggtagtaaaaggtaatggtgttgttggttgtatgttagttgatgtttgttaggatgatagtataaattaggaaggatatgtttaatttgtgaagataggtagtggtatgggggtaggtggagtgatggggtagagtgtggttgtagatatatattttatgtaaggtttttgggttgatttgatttaatagggatttgttttagataggtgatgtttggggtagatgaagtttttagggttattaggtgtaggtaggaggggagagaaggggttgggtgggtagggagagggtgttttagagggaggtggtattaagattttagatatttgggttaagagtagagggttatgttttgagttgttgtttgtggtattttattgtagattttggtgtttttgttaagtgatatagatatttttttttttttttatttttttttttttttttttatttttttttttttttttttttttttttttgttagggttgatttttttattaggtttaatagatatagtttggggtttatattatttttagggttttttttttaatgttttaattttttttataattagaagaaaaaaagaatttttagtaggaagaaaatgttgtaatattgtatgtgatattaatatatttatttttatattaatgtagttataatatagtatgtttgttttttttttatggagagaggtttaagtgtttgggggttataaaatttattatatggttttattttttgttttttatttttttttttattaattatggggttttaagtaattagtattgttttatggagttttggttttattttttgtaaatgggttaataatggtgatgtttttttaagtaggatgaagtaaaataatattagaaaaagttttggttataaagtggtgtttgttttttttttaggaggttttgggattttgggagttaggtgggtgatgtatttgaaaattttagtggatggagtttttggtaatgttttttatgggttttttaagttaaatgtattgttagattttttttttgggtttgatttattatttttttgggttttttggtttttttaaagagtaaatgttttttttgattttttgagaaaatttataaggtatttgagtatattagatggattaaataatgtttttaaattttaatggaaagaaagtagttattatgatgggttttagtaaggggagggagttgggggtttttttgtttttttattgttgggattggatatattggggtttgtaatatttagtgtagatgaaaatgt

SEQ ID NO: 4104 - DNA, 2489 bp, Artificial Sequence
  chemically treated genomic DNA (Homo sapiens)
atatttttatttgtattgggtattgtaaattttagtgtgtttagttttagtagtaaaggaataaggaggtttttaattttttttttttgttggagtttgttataatggttgttttttttttgttggaatttaaaggtattatttgatttatttagtatatttaagtgttttgtgagtttttttagagggttaagaaaagtatttgttttttagagaaattagggagtttaggaagatgatgggttagatttgagagaagggtttgatggtgtatttagtttggggagtttatagggagtattattagggattttatttattgagatttttaaatatattatttgtttaatttttaggattttagagttttttgaaaaggaggtaaatattattttgtggttaaagttttttttaatattattttattttattttgtttgggaaggtattattattattagtttatttgtaaaggatgaaattgagattttataaggtaatgttaattgtttagggttttgtggttagtgggaggaggggtggggagtagaaagtagggttatgtgatgaattttgtggtttttgggtatttaggtttttttttatgaaaaaaaaataaatatgttatattatggttatattggtataaagatgaatatattaatattatatatagtattataatattttttttttgttgaaagtttttttttttttttaattataaaagaaattaaaatattggagaaggggttttagaggtagtgtgaattttaggttgtgtttattgggtttaatggagaagttagttttggtaggaggagaggagaggaagagaaggaagatggagaggagggaaaggaggtagaggaagaagagaatgtttgtgttgtttagtaaaggtgttaaggtttgtagtgaaatgttataggtagtagtttaaagtgtggttttttgtttttaatttaagtgtttgaagttttggtgttatttttttttgagatattttttttttatttatttggttttttttttttttttttatttatatttagtgattttgggagttttatttgttttagatattatttgtttaaagtaggtttttgttagattagattggtttaagggttttgtgtgggatgtgtgtttgtggttatattttgttttgttattttatttgtttttatgttattgtttgtttttatagattggatgtgttttttttgatttatattgttattttggtaggtattaattggtatgtagttagtaatgttgttattttttgttgttattaatgtagttatttattttatggaaaatgattttaatttataaggtattataattaatattggatgattatggttattaatatttatggattgatatttttaggaggggatttgggtgttaattggtatttttttttgtgtttttttttttaatgagattttttttgatttttgttgttgttttagtttttagttttttagttttaaaggaaaatattgtatggtgttttgttttatttttggttgatttttttattttatttttttattttttttaggttttgtaggtagtttagaaataggtttgttgttttaggggtttttgggtattgggaaaggtttggggttttggttgaggggaatttggttgtgaggagtagtaaggagagggagtttatgtttttattttagaggatgtggagagaagagaggtattagggaatgtgtatatttgtttagaaataaagtattgttttagatttttatatttttttttattattaattaaaaatgttttggtttttttatataagatggaatttaaattaattttttttaatgttttatttttgggttggttgaataaatgggggtgtttggggtatttgtatttggggtttagattggagaagatagattatattttttttttttgtttttaggttttggggggtgttaggagttgatgttgtttgggttgagaagagagatgtatttgttatttttttttttttttaggtggaagatgtgttataaatagtagtatgttgttatggtaattaaggtgtttttttttaagagagagggagagtgttttgtttgtggtttttgtatggttttattatttatgtttgtgttttattagttgggttggggttaggtagttttgtataagagtgatatagttaggagggtattgggatgaaatggggtatttgtattttgataaaaggagtagttattgtttaatttttgtaaatagttgttatgtagaaaaatgggtataatgttgttaaattttttgattattgaagagaagtgggaaatttggattaaggtatattgttttaattatttttattgttggtaaagaatgtaaataataatttttttttaagaattaaataaatatggattaaataaaatgtgtttatgaattggttatttgggttgggtagtttggtagttattt

SEQ ID NO: 4105 - DNA, 2494 bp, Artificial Sequence
  chemically treated genomic DNA (Homo sapiens)
gtagtttgttttttagttaaatgggttggagttggatatgggaaaggtgtaattaatattttgttgtgggggttaggtgtgaaggggtttatttggttatatttttttttgggtttgttttttttttagttagataggatgttgttagattttttgtttggttttgaatttttttttgagaatttttttaaaatttaggttgatgttttttttttgtgagttttattttttttattttttagatgggtatgagaatagtttttggggtttttatataggttaaatgtaggaatgtatatgggaagtatttggtaaagtgttggtatttgttaaatttttataaaaatggttttttggtatttgttttgtttttttgttgtgtgattttgggtaagtaatttaatttttttgagttttaggggaaaattatgatagtatatgttttagagagtggttgtaaaggtggttaattattttatagtaatttattatatttgaatggtttttaggttggtttttttatttttattgaattttagtatatagattaggaaatggtatttttggggtagaaaatataattatgttttttgaaaatttattaaatgtgtaaaaaattttttggatatggagaaaaggtagaattttttagaatttgaatggtggtagttattgtgtttggagttgttttttggagagtgatagttgagggagaagattttatagggtttaagttggttaggttttgttattttttggtttggtgtttgatttttgagtggtgagggttagtgaggtgtttgggaggattggtaatttgtgggttttattggtattttatttgattaaggttatttatttttttttttttgtgtattaattgttttgattttaatatgtaaaggtttaattgtttggttttttgggtgtttgtttagtttatagggttttattttgggatagttgaattttttagggtgttgtagttttgtttgttttttttattttttatttggatattattttaatgtaaaggtatggttgagatatagaaatttttttgaaatgtattattgtggtttttattgatttttattgtgtgttttaatggtgggtttagtgggtgggggttgggaggggtggagtaggtgtatggggtagtggtgtttagtatttgttttagttatagttgttggtttattgtatggtaggtttttttaatttggggatattgtatgtatagtgttttttttggtgttttttgtttttgttggtttggtgttgattttatatttgttaggagtattatgaaggtgtttggggggtgagggatttaaggagtgggggtttgtgttttttgtgtgtgtatatagtttttgtttttagtttattatgttttagaatgtttttttttttttttgtttgggtttaggttttattatattttgggtatttattgtataggagggtagtgtttaggattttattaatagttttgggaagggaagggaggtgttgttttaattttggttttataaatggattttagttttttttttagatttttagagttagtttttagtttataagggtgaatttattttttttatttatatgaagatttagaatgtaattaataaattttttaggtgtggtgtgtggaggttgttgagtaatggtagagtggagtagtgtttaggtattttttttttaattttttatgttttttattttttggagtggtgagtttttatttttgttttatgagattgagtttagtttttaggtgttttataagtttttattgaatgtatgggttttattggagttattttttggatttttttttattttggtagtttagtgtggtattttaggtatttaggaggtgatggaatgaatttatttttagtttttaaattttatttagtgttgggattttataggtgggttttgattttgtgggtatattagattgggtgtgaggggattggagaattgtatgttttttaaaaagattatttagtattatggaatagtgtttagtatttagtaggagtttagtagattaaaaaaaaaattatagatagggttttgttttattgtttaggtttgttttaaatttttggttttaagtaattttgttttatttggttttttagagtgatgggattataagtgtgagttattatatttagttttaatagatttttgtttaatgggttattgttatgattttttatttggaaaatgttgtattttttagaaaaaaataaattaatattattggtgtttttggaattatatagttttttggttggagtagggattgttatgaggtatgagtgagggggtagatttttttgaggtttttttaatttttaaaatagatttatttattttttaagggtttgttgaggatttattgggtatttagttttatgtgtaagattttttttaatatagttttggttaggtagatggtgtgttaggg

SEQ ID NO: 4106 - DNA, 2494 bp, Artificial Sequence
  chemically treated genomic DNA (Homo sapiens)
ttttgatatattatttgtttggttaaggttgtgttgggaaaagttttgtatatggagttgggtgtttagtaaatttttaataagtttttagagaataaataagtttgttttaaaaattaaagaggttttagaggagtttgtttttttatttatgttttataataatttttgttttaattaaaaagttatatagttttaaaaatattaataatgttgatttgtttttttttgggggatgtagtattttttaaataaaaggttataatagtaatttattaaataaaaatttattgaggttgggtgtggtggtttatgtttgtaattttattattttgggaggttgagtgaggtaggattgtttgaagttaggagtttgagataagtttaggtgataaagtaagattttgtttataattttttttttaatttattgagtttttattaagtgttagatattattttataatattgaatagtttttttaaaaaatatgtaattttttaatttttttatgtttagtttgatatgtttgtaaggttagggtttgtttgtgaaattttagtgttggatggaatttaagagttgagagtgaatttattttattattttttgggtgtttagggtgttatattgagttattagggtaggagagagtttagaggatggttttaatgggatttatgtatttaatagggatttatggagtgtttgagagttggatttagttttatggggtagaaatggaaatttgttattttaaagggtgggggatatagaggattgggggaggggtgtttgagtattattttattttgttattatttagtagtttttatatgttatgtttgaagggtttgttgattgtattttaagtttttatgtgaatgagaagggtaagtttatttttgtgaattaagggttgattttggagatttggaaaaggggttggagtttatttgtaagattagagttaggatagtattttttttttttttttagggttgttggtgaagttttgagtattatttttttgtatagtaagtgtttaaagtgtgatgagatttgaatttaaataaaaggggaaggagatattttaggatatgatgggttgggggtgggggttgtgtgtatatgtaggaggtatagatttttattttttggattttttgttttttagatgtttttatggtatttttggtaagtgtgaaattggtattaggttggtggggataaagggtgttgaggggggtattgtatatgtgatatttttggattaaaggggtttgttatgtagtgggttagtagttgtgattggaataggtgttgggtattgttgttttatgtatttgttttattttttttagtttttatttattgggtttattattaaggtatataatgggagttaatgaggattgtaatgatatattttaaggggatttttgtgttttagttatgtttttatattaaaataatgtttagatgggaggtgagagaggtaggtaggattgtagtattttgaggggtttaattgttttaaaatagagttttgtgagttgggtaggtatttaggaggttaggtagttggatttttatatgttaaaattagagtaattggtgtatgaaggaagagaaatgggtagttttagttgaataagatgttaataaagtttgtgaattgttagtttttttagatattttattaatttttattgtttagaggttaggtgttaggttaggaaatggtagaatttggttagtttgaattttgtggaatttttttttttaattgttattttttaaagagtagttttaggtatagtggttgttattatttaagttttaaaaagttttattttttttttatgtttagaaagttttttatatatttagtaaatttttaaaagatgtgattgtgttttttgttttaaagatgttgttttttggtttgtgtgttaggatttagtgggggtggggaagttgatttgagaattgtttgggtataataaattattataaagtgattagttatttttatagttattttttaaaatatatgttattatagtttttttttaaggtttagagaggttaagttgtttgtttaaagttatatagtaaggaagtagagtaaatgttaaggaattatttttgtgagagtttagtaggtattggtattttgttaggtgttttttatatgtatttttgtatttagtttgtatagaaattttaaaagttgtttttatgtttatttgaaagatagagaaaatgaggtttatagaagagaaatattagtttaagttttgagaaagtttttaaagaaggatttagagttaggtggggggtttgataatattttgtttggttagggagggggtggatttgggagagggtgtggttgggtgggtttttttatatttggtttttatagtaaggtgttggttgtattttttttatatttagttttgatttatttggttgagaaataggttgt

SEQ ID NO: 4107 - DNA, 2472 bp, Artificial Sequence
  chemically treated genomic DNA (Homo sapiens)
attaaaggtatgagttataatatttagtttatgatggattttgagttaatttatgtttgatgtgtgtgaagggttaatgtttttttgttttttaaattttttttgtatggttatttaattgttggtgtattatttgtttaaaagagtttttttttttgtgaaattattttggtggttttgttgggtattaattagttgtttgtgtgtggttttgttttttgttattttgttttgatgttttttttttgttgatattattttgttttgatttttgtgtgttttaagtgaattttgaaatttggtagtgttagttatttgattttattttttttaaaattgttttggtttttttaggttatttgtatttttttatgaattttagaatttatttgttatgtaaaaaaaaaaaatttgttagaattttgattgggattgttaaaattatttttaaaaattattgaagttgattttgaaatgtagtatgtaagggtttgggtgtgtaatttgtatgtgagttttagtgtataaaagaaagtgagagttagtaagttgggttagaggggataaaggagagagtggtggtgtatgtgtttaggtttttgttggtttttgagagtttttttttttttagagtgattatagggtgggtaggaggttttttaggatttttggagggtgtgtttttttattaataatgataaagggtgtgatgtagattttttaattttattatatgtgaaaagagtgtttattgttgaaaggattaaataagataagatgttgagtagttgagttgtaaatgtttgtggattgaagtttaaagttagtttatatagatttatttatttgtttattttttgttgtggttttttgtgttttagttattattattgttttatggtgtatggttgatgtgttgttttgtaaagggttaggtgttattttttagtatgtattattttttattggttttgtttttggggtttatgatatatattatttggttatttttattttggagtattataggttaaattagttagtaatttgtggaattaatttatgagtggtgtttatttttggataatggtttagtggaggggttggtttgtagtttatatttattatggttttgttgaatggtgtttgttagattttgtataattgaatttagtttagttttatgaaggttttgtataagttagttttttttttttgttatttgatggaataatagatttataggagaatttatttgtaattttaagttttgagttaaagatgttttaagggatgaatgtgggtgatttgtggaatattgtgatgtatttatgagatagattgtatgtttattgtggtgtttaaagaaattagattgggttgtattagaggtggtgttgtaatttggttgttttttgggaaagaatgtaagtttttagtgtgtgaagtatgaggggttgtagaggaaattgttttggtggttttggttttgggagtaagtatttgttttttgtttatttaagtatattagtgagttttataaatatttaagtggtttatgagatgttttatttttaggttttgttttattttttttgttgttatatagaggttattagaaattatggttttttgggtttgatagttaggtagataggattaggttaggttgtagttgttaatttttgtgttggtaatttttagattttttgtataatgttattgtttagttatttttttttgggttgtttgtttttatggggtttttgtaattaaaaaaaataataatttatttttattttttttttttaatatgttttattaataattgtgtaaatttgtttattttttaggattttattatgatgtaaagtagataaaataattaatttgttttttttttttttggtatatgggtgttttgtagtttttattttttttaatttttgttttatgtttatgagtatgaagttgaattaatttatgttttgttgaagttggattgtgagattgtgtaggtagatgtggttttttttttgagtttgtaaagtagtagaatttatgataatgggttttgtagtaatagggattgattgtgttatgttgtttttgtttatttttatagtgtttaggagtttgtatgttattattgggattattttatagaaaatagaggtttttaggggtaatgtaatttgttttaggataggtagttataaggtagagaaaggagggttggatttgtatttgtgaaattatagttttggggtatggtttttgagatttatagttggggttgaagatttttaggggggttttgttgggtttattgttttttagagtggtttagtttggttgtagggtgttgtttttagtttggtgtattgtggttggaggaggtggaggatggaaagtaagatttaaagatagggagtgtaaggggatagtgatatttgaggattttgaggagga

SEQ ID NO: 4108 - DNA, 2472 bp, Artificial Sequence
  chemically treated genomic DNA (Homo sapiens)
ttttttttggagtttttaagtattattgtttttttgtattttttgtttttgaattttattttttattttttattttttttggttgtagtgtattaagttggaagtagtattttgtagttgggttggattattttggagagtagtgagtttagtagagtttttttagggatttttagttttagttatgagttttagaagttatgttttagggttgtggttttataggtgtaggtttaatttttttttttttgttttgtggttgtttgttttggggtaggttatgttgtttttgggagtttttgttttttgtaaaatggttttagtaatggtatgtaaatttttgagtgttgtaaggatggatagagatagtatggtgtagttagtttttgttattatggaatttattgttatgaattttgttgttttgtaggtttagaagaaaagttatgtttgtttatataattttataatttggttttagtaaagtatgagttaatttaattttatatttgtgaatgtgaagtgggggttggaaggaatgaaggttgtaggatatttatgtattaagaaaaagaaagataaattggttgttttatttattttatattatgatggagttttaaaaagtaaataaatttatatagttattaataagatatattaaaagaaaggagtgagaataagttgttgttttttttaattgtaggggttttatgaaggtaggtagtttagggaggaatgattggatggtgatattgtgtagggggtttggaagttgttagtgtaggggttagtagttgtagtttggtttggttttgtttgtttggttgttaaatttagaagattgtggtttttggtggtttttgtgtgatagtggaggaggtggggtgaggtttggaagtgaagtattttgtgagttatttaagtgtttatgaagtttgttaatgtgtttaaatgaatgagaagtaggtatttgtttttaggattagagttattaaagtaattttttttgtagttttttatattttgtatattggaagtttgtatttttttttagaggatagttggattatagtattgtttttaatgtaatttgatttggtttttttgagtgttgtggtgaatgtgtaatttattttataaatgtattgtagtgttttataaattatttatgtttattttttgagatgtttttaatttggggtttagagttgtaaatgaatttttttatggatttattattttattaaatagtggagagaggggattagtttgtgtagagtttttatagagttgggttaaatttgattatgtaaagtttaatgagtattatttagtaaaattatggtgggtgtgagttgtaggttagtttttttattgggttattatttaggggtaaatattatttgtgggttagttttatgagttattggttgatttgatttgtgatattttaaggtggaagtaattaaataatatgtattatgagttttaagaatgaagttagtggagagtggtatatgttagagggtaatgtttggttttttgtaggatagtatgttagttatgtgttatgggatgatggtggtggttgggatataggaggttatggtaggaaatgggtaggtgggtgggtttatgtaagttggttttagattttaatttataagtatttgtagtttaattatttagtgttttattttatttaatttttttagtaataaatattttttttatatgtagtaaggttaaggagtttatattatattttttattattattaataaagggatatattttttagggattttagggaattttttatttattttgtggttattttagggaaaggaaagtttttagggattgatgggagtttgggtatatgtgttattatttttttttttattttttttagtttggtttgttggtttttatttttttttgtgtattagaatttatgtataagttgtatatttaaatttttgtatgttgtattttagagttaattttagtgatttttgagagtgattttgataattttagttaaaattttagtaggttttttttttttatatgataagtggattttaaaatttataggaaaatgtaaatgatttagaagagttaaagtaattttggaaggagtaaagttgaatggttgatgttattagattttaagatttatttgaaatgtataggaattaagatagggtggtgttgatagaaggaaggtgttagagtagggtgataggaggtagggttatatatagatggttgattgatatttgataaaattgttgaggtaattttatagggaaaggaatttttttgaataaatggtgtattaataattggataattatatggaaaaaatttaaaaaatagaagaatattgattttttatgtatattaaatataaattaatttagaatttattataggttgggtgttgtggtttatgtttttaat

SEQ ID NO: 4109 - DNA, 2474 bp, Artificial Sequence
  chemically treated genomic DNA (Homo sapiens)
ggatttgattagtttttgttaaattgagtatataagtgaggatgtatttaaaggagtgttagtgtattttttataaattttaaatgtagggtaagttggtttatgttattgttgaaaagtagtgtgtgtttgaggaagggttgtattatattgggtgtggatggaattatgtttttttgatgtgtagattttttgaatattttatttgtagaatttgtttttaaataaatattattattattaggttagtgaaatatttttatattgtttatgtttattatttgttgtgtaaatatttgtggttttaaaagaataatagattgtgagaattttagtaaaatgattgtagaattaattatttttttaagtagaagtgatatttttaataggtttatttagatggttttagtttttgttttggggttttatattaaattttatttaggttgtttgtagtgaggggtagaaggttgtgttatagagatttaaaggtaaaatgtggggtgtttgtttgtatttagtggagttttatttatgattagtgatttttagagataggtaagggtgttaggaggtttttgggatgtattgaagtagttttttttaggaaataagtggtaaagaagaattttaattttttttatgttgataaaaaaatatatatgtgtgggaatgtatgttttgggtttgagtattgattttttttttgtagttttttggttttggtattgttggttttaggggttgaattattttatggtgggggttgttttgtgtattgaaggttgtttaatagtgtttttggttgttattttttagatgatttttaggtgtattttttttttttttttttatttttaggtatgtgaattataatgtttttagatgttgttagtgtgttttggagattaaagtaatttttgattgagaattgttgtttaggaagatatattttttatttgtttgttgttttttaatgtaatttatagttgagagatattttgttttatttaggtgtgaagtattttgttttatttggaaggttgggtatatttaaatattatttttttgtatgtttatttgttgtagagtggttaatgttttttaattggtgtagtaaatattttagagttttttttgttatgttggagttatttagaaattagttttgaaatgtggttgttattttagggattattatatattatttgttgtttggtgttaaattttgagttgttgttatttaatattgattaataaatggtaggttgttagtattggtagtgaagatattttaaggagttattgtttttttaaattaaaatatttaaatatttaaatttagggttggtttttatggtttgttttaattattttttttgttttggtatatttttttttttttgattatatagttgttatgttagtagtatttggagttggaatatgatagttttttttttattagttgttattatttttgtaaggaaagttggaagttgttggagtagatgttaattttgagagaagattgttggttaagttattaaaatgagtgtatttgaaggttgtgatttatatgatttatatgtgggtagggtttgtaggattgggttttgtttggttttgtatgtgtgtgtgtgtgtggatttgtgtatgtgtgtttttttgtgtggtgtgtttgtgtatttgtttgtttttgtgtgtgtgattgtgtgtatttttttatgtgtttatatttttgtgtgtttgtgtatgtgtttgtgtgtgtgtatgtttgtatttttgtgtgtgtgtttttgtggatatttgtgtgtgtgtttgtgtgtgtatttgtgtgtgtgattgtgtgtatttgtatatgtgtttatatttgtgtgtgtttgtatttatgtgtgtgtatttttgtggatatttttggttgtttgtgtgtgtgtttgtgtgtgtatttgtttgtgtgattttgtgtgtgattgtgtgtatttttatatgtgtttttgtatgtttgtgtgtgtatgtttgtatttatgtgtgtgtgtttttgtggatttttttatgtgggtgtttgtgtatttgtatatggttgtgtttttttttgtgtattttgtgtgtgtttatgtgtatttatgtgtgtgtgtgtatgtgtatgtatgtgtgggtttttttgtgtatgtatttttgtgtatttgtatgtgtgtttttttgtgtgtgtttgtgtatatttttgtgtttttgtatgtgtgtgtttatgtgtgtttgtgtgtgtatttgtgtgtatttgtatatatgtgtatgtgtgtgtgggtttttttgtgtgtgtatttgtgtgtatttgtatgagtgtttttttgtgtgtgtttgtgtatatttgtgtgtttttgtgtgtgtttttgtgtatttgtatgtatgtgtatttttgtgtgtttttgtgtatatttgtgtttgtgtgtatatttgtgtgtatatgtatgtgt

SEQ ID NO: 4110 - DNA, 2474 bp, Artificial Sequence
  chemically treated genomic DNA (Homo sapiens)
atatatatatatatatatagatatatatatagatatagatgtatataaagatatataaagatatatatatatatggatatataaaaatatatgtagaaatatataaatatatatagatatatatagagaaatatttatgtagatatatataaatatatatataaagaaatttatatatatatatatatatatatagatatatataaatatatatatagatatatatagatatatatatgtagaaatataaaaatatatatagatatatatagagaaatatatgtgtagatatataaaaatatatatataaagaaatttatatatatatatatatatatatatatatatagatatatatgaatatatataaaatatataaagagagatatagttatatatagatatatagatatttatatagagagatttataaagatatatatatatagatatagatatatatatatagatatatagagatatatatagagatatatataattatatatagaattatatagatagatatatatatagatatatatatagataattagagatatttataaagatatatatatatagatatagatatatatagatatagatatatatatagatatgtataattatatatatagatatatatatagatatatatatagatatttataaagatatatatatagagatatagatatatatatatatagatatatatatagatatatagagatatagatatatagagagatatatataattatatatatagagatagatagatatatagatatattatatagagagatatatatatatagatttatatatatatatatatatagagttaagtaagatttggttttgtaggttttgtttgtgtataaattatatgagttgtagtttttggatgtgtttattttaataatttagttagtagtttttttttaaaattaatatttgttttagtagtttttagttttttttgtgaaaataatggtagttaatagggaaagggttgttgtgttttgattttaggtattgttggtgtgatagttgtgtgattaggagaagaaaggtatgttaagataaaaggaataattaaaatgagttatgagaattagttttggatttaaatgtttaaatgttttaatttaaaagaataatggttttttgaagtgtttttattgttggtattgataatttgttatttattaattagtgttaaataatagtggtttagggtttaatattaaatagtagatgatgtgtgatgatttttaaaatagtagttatattttagggttgatttttaaatgattttggtataataaggaagattttggaatatttattgtattaattaaagagtattaattattttgtgataaataagtgtgtaggggagtggtatttaaatatgtttagttttttaggtaaagtgaggtgttttatatttaggtggggtagggtgttttttaattatagattatattaaaaaataataaataaatgaaaagtgtgtttttttaggtagtggtttttaattaggggttgttttggtttttaagatatattggtaatgtttaaagatattgtgatttatatatttgggggtggaggaaggaagaaggggtgtatttaggggttatttaaagggtggtggttagggatattgttaaataatttttaatgtataaggtagtttttattatggggtgatttagtttttgaggttaatagtgttaaggttgggggattgtagaaaaaggattagtgtttaaatttaagatatgtatttttatatgtgtgtatttttttattagtataaagagggttaaaatttttttttgttgtttgttttttaaaaggagttgttttagtgtattttgggagttttttgatatttttgtttgtttttggaagttattgattgtggatgaggttttattgggtgtaggtaagtattttatgttttgtttttgagtttttgtaatgtagttttttgttttttattgtaggtagtttaagtggagtttaatgtagaattttaaagtgaaggttggaattgtttgagtgggtttgttagaaatgttatttttatttaaaagggtggttagttttgtaattattttattggagtttttatgatttgttatttttttaaagttataaatatttgtatagtagatgatgagtataagtgatatggggatgttttattgatttgataataatgatgtttgtttaaaaataggttttgtaagtggagtatttggagggtttgtatgttagggaggtatggttttatttatatttggtgtgatgtggtttttttttggatatatattgttttttaatagtggtatgagttagtttgttttgtgtttgggatttataaaaagtgtattaatatttttttaaatatatttttgtttatgtgtttaatttagtaaagattgattaaattt

SEQ ID NO: 4111 - DNA, 2481 bp, Artificial Sequence
  chemically treated genomic DNA (Homo sapiens)
tattttgattatgttttgtttttagtagagataatagttttagagaggttaggatttttatttaaggttatatagtttaaagtatagaattgggttttgaattttaaaagttagattaaagagtttattttgtagttattttgttgtgtgtagttgagaattttgtgggggttagttgtgtttgagaaagtatgtgaggaaattgaagtttttttaaaattgtgggggtggttttattgtttttgtttttattgtttttgagttagttgtaaagaaaggaatttttttgtagagtattgttttgaaggaaaatttatttggggaaaaaaaaaataattgtttttgttgggagtaatttttaaatgggagtttatgtgtgggttttttgtttgttgttttaagtaaattagttatttttattgtagaatggttgtaaaggaaatggagaaaaggtagagtgtagttttgggagttgttttttagtttgggggttgggtagggggaaataggtgttatttgggtttagatggggtgatgtttgggaggagaggttggaggaattgggtttttttattatggggttttgtttgtggttattgttgtttatagaggttttataggtgtatgtagtgtttttttttgtttttttggttgttgttttttgtgggatagttgtaggttggtttttgttggaggggtttttttgaattttgtttattttgggtttggttttttttaatatggtagttggggaggtagaggaggtggtgtgtttattttgttattgttggggtttgatttattaataggtttggatagtgttttttttttttttatgtttttattgttaattgtttgtttgtagagtggttagttttgttttagtagtgtggtgagttgtagttttgttgttgatggtgtgtttgtgatgtgttgtggggttttgttgtggtggttgtggatgggttgaggtttttttttggatgtttttagagtggtagggagtagtttgggtattttttatgtttggtataatttgtttgggttggtagttagagaagttaggtagagaagtgtggttagagaggttgtttaatttaatttttttgggttgggttatttgaaagtttaaaattttttaatattaagagatgggtggtatttaaatttaagtttggtttttaaatgaaatttttttgtttaattgtttaattttatttggaaatatgaaatggtaatttgattatatgttaaggtagttttggttgggggattagagttgaaatttttgtttttttgagtttattttttagtgaatggaatttatttaaattaggaattagttttgttattgtgggtgagttgtaggtttggtggtttggagggtggggtattttgaggttgtgggattttagttattttgtatggttaggataagggggtgtttagagttttgtgttttttaagggaggttggaaggaaatgtttaattgtgtgttttttagagttttagtaaattatttgatgtttataaattgttagtgaaagttatttgtaagaaaagttttatttttagtggttttgtagtttagaaaatttaaaattgaaaaatatatgttatttaggaaggataggagaaatgagaataggttttattgttgtagagtgtgaggttggtttttgttgtgtttgtttttaggaggtggtgttgagatggtggaggtaatggaagtagaaatgagtgaaatttttttgttgtgtttagtaagtattttttgttaaggaagttgttaaatttataaatgtttttgttaagagagaggtgtttgttttttatatgagtttgttgttggtaaggaggtatgatagaaaatgtgttaagttgggatttggagtaggtggtggaaatagtagtttgtaggatgttggttttgtttgtatggtggtttgagagttgtttgaattgttgtgttgaggatggggttggagatttgtttttaggtgaggggttggtttttgtaggttttgttttgtttttgaggtattattagatgggtgttattagttatatggtgtaggtgaggagatagaggattgaggtgggtagaagtgataggagaggtaaagagttgttttttgtatagttattgtttatgttgtttgattatttttttttgttgtttagtttttgtatttggttttggttttatttattgttggttattagttatttggaggttagttatatttggggggtagttttgttgtttggatttttgagttatattgaaagtatttagttttttttttttttgaagtttttaggttttgttttttttttattatatgggtttttttttgagtattttttttgttttttttgtggatttgtttagtttttgtttggtgggtgtgttaggtttttgttgttttagtgtggggattttttaggggagggagtggttgtagttttagaagtgt

SEQ ID NO: 4112 - DNA, 2481 bp, Artificial Sequence
  chemically treated genomic DNA (Homo sapiens)
gtatttttgaggttatggttatttttttttttggaggatttttatattgaggtagtagaaatttgatatatttattaggtgagagttgggtaggtttatagaggagataggagggatgtttagaggggaatttatatggtaaggagagggtaggatttggaggttttaggaggaagggggattgagtgtttttggtgtggtttagaggtttagatagtagagttgttttttgggtgtggttgatttttaggtgattggtggttagtagtgggtgaggttgaggttagatgtagaggttggatggtggagaggggtggttagatagtatggatagtggttgtgtaggggatagttttttgttttttttgttatttttatttgttttggttttttgtttttttatttgtattatgtggttggtgatatttgtttggtgatgttttagagataaaatagaatttgtagaggttagttttttatttgagggtgaatttttagttttgtttttagtatagtagtttgggtggtttttaggttgttatgtaggtaggattgatattttgtaaattgttgtttttattatttgttttgggttttagtttgatatgttttttgttgtgtttttttattaataataagtttgtgtggagagtaggtgttttttttttggtaagaatatttgtgagtttggtaatttttttgataagagatatttgttaaatataataaaaaagttttatttgtttttgtttttattatttttgttgttttggtattgttttttggaagtagatgtagtgggggttggttttatgttttgtagtgatggagtttgtttttgttttttttgttttttttgggtggtgtgtgttttttagttttgagttttttaagttgtagagttattggaaatggagttttttttataaatgatttttattgatagtttataaatattgagtgatttgttagggttttgggaagtatatagttgaatgtttttttttaattttttttggggaatgtagagttttgggtgtttttttattttggttatgtagagtaattggaattttgtagttttaagatgttttattttttaggttattaggtttgtggtttgtttgtggtagtagaattgatttttaatttggatggattttatttgttggaggatgaatttagaggggtagagattttggttttaattttttgattaaagttattttaatatgtaattaagttattattttatatttttaaataaagttgaatagttgaatgaaaagattttatttgggagttagatttaaatttaaatattgtttgttttttggtattagggagttttagatttttaaataatttagtttggggaaattgggttggatagtttttttggttgtatttttttgtttggtttttttaattgttagtttgggtggattgtgttgagtgtggagagtatttaggttgttttttgttattttgagagtatttagaggaagattttagtttgtttatagttgttatgatgggattttatagtatattgtggatatattgttaatgatggagttgtgatttgttgtgttgttgagatagggttggttgttttataggtaggtaattagtagtgggggtgtgggaaggaggggagtgttgtttagatttgttggtaaattaggttttggtagtgataaggtagatatgttgttttttttgtttttttagttgttatgttggagagagttagatttaggataaatagaatttggagaagtttttttagtgagagttagtttgtgattattttgtaaaaggtagtagttaggaggatggggaggaatgttgtatgtatttgtgaagtttttgtggatggtggtggttatagatagggttttgtggtgggaaggtttggtttttttagtttttttttttaggtattgttttgtttaggtttaggtggtatttgtttttttttgtttggtttttaggttgggaggtagtttttagggttgtgttttgttttttttttattttttttgtagttattttgtagtgaaaatggttgatttgtttgaagtagtaagtgaaaaatttatgtgtggatttttgtttggaaattgtttttaatggagatagttgttttttttttttttaagtaagtttttttttaaagtgatgttttgtagagaaatttttttttttataattaatttagagatagtgaaaatagggatgatggggttatttttatgattttgggggagttttagtttttttatatatttttttaggtataattgatttttatgaggtttttggttatatatagtagggtggttgtagggtgggttttttagtttgatttttggggtttaaagtttagttttgtattttgagttgtgtgattttgagtgagaattttgatttttttgagattgttgtttttgttgggaatagagtatgattagggtg

SEQ ID NO: 4113 - DNA, 2425 bp, Artificial Sequence
  chemically treated genomic DNA (Homo sapiens)
gttattaagaagaagaagaggggtttagaggtatgtagaatttagttgaaaaagaataatttatttatgtttgaagttttaaattagttttaattatttttgttaagagttgaggaagggatttaggagaaaggggattaaatttattttttttttttttatgaattttagtataatttgttttaagttaatttttattgaatgttgtgggttgattgttattttaagttatttgttttttttaaatattttaagaagtgttttgatttattttatagatgaagaaattgagatttaaagaggttaagtaattttttaagtggtgaatataggtggtagagaagattgaagatttaaattttggttgttagtttttaaaatttgaatttattattgatttttatggtattggtttggattagattatttttaatattttttttaattttgagattttaggattttttgatgttaggatattataaatttattataatttttttaaatttgttaaattaattttagatttttatgattatagatatgatatttttagaattaatatttaaattaaggtaggattattatatagaaaatataattgagtagaatttatttttgttatgttgttttttttagaattgattttaaaatatagtgttatgtttgttagagttagttatttgtaatgtgttagaattttgattttaggtaagtgttaggagttaaaatgtaggtttttttaaatttttaagtagttgtggtgttaagttgattttgatgagttgagtttttattgagtagtttaaatgattagattgtaattaggggttttatttttttatttatgaagtattagggtagttaaggggaaagattgatgtagaaggaatgaggtttttatgggttgggtttaaaagatttagagtgagtgtttagttgaaatatttgttaaaattttaaggaatatttatataaaaataagaagttgtttggtatagaagttagggtaggggatgttttttgaaggttatattttatggtaggtatatagtagtatgtttaaatatggtttttgttaaggttagagaggtattatttatatagaagaagttattattgtgattttatttattttgtgtttttattgtgtaattgaatgttgagtgtggatggtattttttttagtatttggttgtgttattgtgtttagttggtaagttttgggggagaagagaggtttagaaggaagattatttgagtttattagaataatgtgtgtttttaataaggtaggggtgtttaaatttagtaggtttaatagattaagttatgttatgaaggttttgtggattatttatttttgttaattagttattatttaaaagatgagaaaatgttagtttataggttaaatgggaggtatttagaagagatattaatgaagagatgtttggttttgtattaattattgtaggtaaattaatattaaatgttaggaagtaaagtagaggtatttttttattataaatttttgggataagtttagagattattagtagtttagggtttgtgtatgttgagaattgaggggataatagaattgtgtaatattttggtgttttattgtttttgttattaaattttatagtttatagtattgttttggtatattgggtttgtgtaatatttatggatttgatttggaattataaagtggatttagtttttgttatatttatttattttagtgattttgggtatatattgtgtttttgaaggaggtatagtggttataaatggaaatagtatttgtttgtttttggggattttggttatagatttttgaggtttttttgggagttagtttaagataatgggtaagagtatggattttgaaggtagagttttttgtttggaattttagttttgttattttttaattgtgtggttttaataagttatttagtttgtttgtgatttaggttttttatttataaaatgggtataatagtttttattttatagggttgttatggtgatttgtgggttaatattaaaggagattttttaattttagtattattgatatttggggttggataattttttgttttgggggttgttttgagtattatgggatgtttagtaatttttttattttttatgaattgttgtgataattaaaattgtttttagatattgttatatgttttaaatattttttaggggggtaaaattgtttttagttgagaattattgtattagattatgttgtagatataaatagttaaatattagtaattttatgtggtttaatttaataattataaagtatttaatagttaaaattttttgaattttgtagatatatttatgtgttttatttgggataaatgaatttaatgtttttattagatgttta

SEQ ID NO: 4114 - DNA, 2425 bp, Artificial Sequence
  chemically treated genomic DNA (Homo sapiens)
tgagtgtttggtgaaagtattgggtttgtttattttagatgaagtatataaatgtatttataaagtttaaagagttttaattgttaaatattttataattgttagattgaattatgtgaaattgttgatatttggttatttgtatttatgatataatttaatatagtggtttttaattggaggtaattttgtttttttaggaaatatttgggatatgtggtaatgtttggagataattttggttgttataatagtttgtagagggtagggaggttgttaaatattttataatatttaggatagtttttagaataaagaattatttggttttaaatgttaatggtattgaggttgagaaattttttttaatattagtttatgaattattatgataattttatgaggtaggaattattatgtttattttatagatgaggagtttgagttataggtaggttaagtagtttgttaaggttatatagttgggaaatggtagggttaggattttaagtagaggattttgtttttagagtttatatttttatttattattttagattggtttttaggaaagttttagaagtttatgattaaggtttttagaagtaggtaaatgttatttttatttatggttattgtgttttttttagaggtatagtgtgtgtttagagttattggggtgaatgaatgtaatagaagttgagtttgttttgtgattttaggttaagtttatgagtattatataagtttagtgtgttaaggtgatattgtgaattgtgagatttggtaatgggggtggtggggtattaaggtgttgtataattttgttatttttttagtttttagtgtatataagttttggattgttggtggtttttgggtttgttttaagggtttataataggaaaatgtttttattttattttttggtatttggtattaatttatttatagtaattaatataaagttagatatttttttattggtgttttttttaaatgttttttatttggtttgtgagttggtgtttttttattttttaagtggtgattggttggtgggggtaggtggtttataagatttttatagtataatttggtttgttggatttattgagtttgggtgtttttgttttgttaaaagtatatattgttttgatggatttagatggttttttttttgaatttttttttttttttaaggtttgttaattgagtatggtaatgtagttaagtgttggaagaagtgttgtttatatttagtatttaattatgtggtgggggtgtggggtgggtagagttatgatgatgattttttttatgtgaatggtgtttttttagttttaataggaattatgtttaagtgtgttgttgtatgtttgttatggagtgtggtttttgaagaatattttttattttgatttttgtgttgagtaattttttatttttgtgtgggtgttttttgaggttttggtaaatgttttaattaagtatttgttttaggttttttggatttagtttatgggaattttattttttttgtgttagtttttttttttgattgttttagtgttttgtgggtgagagaatgaagtttttggttatagtttggttatttgaattgtttagtaagaatttaatttattgaaattagtttggtattgtagttatttggaagtttgaaggaatttgtattttagtttttagtatttgtttagagttgaaattttgatatattataaatgattggttttgataaatatagtgttgtgttttagggttaattttgaaaagaataatatggtaaaggtagattttatttagttgtgttttttgtgtaataattttattttgatttaaatattgattttaaaagtattatgtttgtaattatagagatttagaattggtttgataaatttaggagagttataataggtttataatgttttgatattagagaattttagaattttagagttggaaaagatgttaaaggtaatttaatttaaattaatgttatggagattagtggtaaatttaggttttggaggttgatagttagagtttgaatttttaattttttttgttatttgtgtttgttatttggaaagttatttaatttttttgggttttagtttttttatttgtaaaatgggttaaagtattttttagggtgtttgagagaagtaaatgatttagaatagtagttagtttataatatttaataaaagttagtttagaataagttatattgaaatttgtaaggagaggaggaatgagtttggtttttttttttttaagttttttttttagtttttaataagagtagttaaagttggtttagaattttagatataagtgggttgtttttttttagttgggttttgtatgtttttgggtttttttttttttttttggtagt

SEQ ID NO: 4115 - DNA, 2492 bp, Artificial Sequence
  chemically treated genomic DNA (Homo sapiens)
aattaatttttaagtgtatttttaaatgtatttttttagttgttaggtagatgagtattttttttttgtgaatttatttttaattttttttttttagttatttattgtatggtattattaatattttttagtatttttgttttggagtttaaagtgatatagttggtaagaagttgtgtaggggttggagtttatatttgttgggtattagagtttttgttttgagttatttgtttgtgttgggattggtaggttatttttatagtagattatttttatttatttttagtgttttagtatgtagttttttgggaatttagattatgatattttttttgggaagtggtatggagaattttggttaggtgttttaagttaagtttatgttaatgatattagggtatagagaagttttttgtggtttatggggaggtgggaatatttgtaatatggtttttttaattttattttgttaggattggagagtatgaaggagtttgtttttttgtaaaaatgggtagttagagggttttgggggttaaatggatatttttttgtttgtagttttttgtagtttttttatgtagataggtatggttaagttttgtggagttgataggtgtattttgattttagagtattgtgtgggtttttaggggttgtaggttattgttgtttttttttttttttttattataaaaggtaggttttttgagaagtattgggtgtatgtttttgagtgaggggttttggtttatagggtagtggttggggtagagttgttggattggtgagtttattgggagtttttagttttgggttaggtttatatagagtttggggtgggggttaatgttattgttgaatgtgtttttttttagtgatttttaaagggagatgaaagttaaaaataattttggtgggggaaatagttggtggatagtgggttagtgatgggggtgggtaggaggatgtggtattgttggggggaggaagtagattaaatgtttttttttttttaagttgtaagggatggatagtattatttgtggtttttgtggttggtattttttttgtagtgtttttttgttaggagtttttttagataataagttgtagaagagagtaggagatggagtaggtattgtgtgtattggattgaaatttttaagtgttttttgtatttgttttagtgttagttatagtttaggtttttaatgttttttggttttttatgttggaagtttttttagtagatggttttatggttagagttggttttttgtgagttttgttgttgttttaattgtagtgtttattatttgagtttttttttgtgagttatttttatttgttaaagtgaatttaggttgattttgtttttgttgtgtttggtttgttatttattttttgttatgagtgattttaaatatgttttatgattgaagagttttgagtagagagaatttagtagttttttaggagttatatttgtttttattttaattatttttttgtgatattgtgggtttgttttttatttgttatttttgatttaggttttaagatatatgtgatttattttattttagtttgataattagagataatttggtgtaattatatgttttttgatagtaattggggtatgagagtataggtggttagggagtgtgggtggtgttaggtttttatagggtatatattgtggtttatgttggttttttttttagatgatatgttatttttattgttttgtgatatttggaaatagtattataagatagtttttttaaggttttaaagtttttttttgttaaggatggtgattagtttattttagttttttgagaataaagtaaaaggaaatgattattattaaaatagaatataagaatgatgtaaaaaaaaaagggttttttgtagtaaaattataaaagggttgtaaagttttagaattttttttattgatgttttgtaaaatataggtattgggtttatgttttttagtgaggggttttggtttatagggtagtggttttttaggtggagtgtttataggtggtttagatgttttattggttttgtttttttttagtttgtgttttggatagattgggtagtgtgtgggaattattttgtgttttattgttttttgtttatattgtttttgtatttatttgaattgttttagattattttggttggttgttttttttagggtttttgtgaatattttttttttaggaaattaagttagaagatgtttttttttttttggaattttttttgtatttgatttgtatattttttaggttttggttgttgtttttgttggatggattgtagttttttagggaaggtttttattttagttttttttgtgttaattgagtatttgttatatttaagtattgggtttggtattggggattttttgagtgaaataaaggttttttgtttttatagagtttatgttttttattagaaag

SEQ ID NO: 4116 - DNA, 2492 bp, Artificial Sequence
  chemically treated genomic DNA (Homo sapiens)
ttttttagtagagaatgtaagttttgtgagggtaaggaatttttgttttatttaaggaatttttagtattgagtttggtgtttgaatgtagtaggtgtttaattaatatagggaggattggaatgaaaattttttttgaggggttgtagtttatttaataaggatagtggttagggtttaagaagtgtatgggttaagtgtagagggagttttaaggagaaggagatattttttagtttggttttttaaaggaggaatatttgtagggattttgaagaaggtagttggttaagatgatttggggtagtttaggtggatgtaggagtagtgtgaataagaggtagtaaaatgtagggtggtttttgtatattgtttagtttgtttggagtgtaggttgaggaagggtagggttaatgagatatttgggttatttgtgaatattttgtttggggagttattgttttgtgagttaaggttttttgttgggaggtatgagtttagtgtttgtgttttgtagagtattaataaaagaaattttagaattttgtagtttttttataattttgttgtaagaagtttttttttttttatattatttttatattttattttaatagtagttatttttttttgttttgtttttagaggattaagataagttaattattatttttggtaaaaggagattttgaagttttaaaaaggttgttttgtgatattatttttaagtattataagatagtaaaagtggtatattatttgggagaggggttgatgtggattatagtgtgtgttttgtgaaagtttggtattatttatattttttgattatttgtgtttttatgttttagttgttgttaggaagtatgtgattatattgaattatttttagttgttaggttgggataaaatagattatatatattttaggatttaggttagggatggtaagtgaaaagtaggtttatagtgttatagaggggtaattaaagtaaggatagatgtggtttttgaagggttgttgaattttttttgtttagaattttttgattatagggtatatttgagattatttataataaagaatagatagtaagttagatatagtaaaaataaagttggtttaaatttattttagtgagtgaaggtggtttgtgagagggggtttagatgataggtattgtagttagggtagtaatagagtttataggaggttagttttggttatgaggttatttgttaaggagatttttagtataagaggttggagggtgttgaaggtttgggttgtggttggtattggggtaggtgtaagagatatttaggagttttaatttgatgtatatagtgtttgttttattttttgtttttttttgtagtttattatttgagagaatttttaataggaagatattgtaggggaaatgttaattataaaggttatagatagtgttgtttgttttttgtggtttgagggaaaaggagtatttggtttgttttttttttttgatagtgttatatttttttgtttatttttattattggtttgttatttattagttattttttttattaaaattatttttaatttttatttttttttgaaggttattaggagaaagtatatttaatagtggtattaatttttattttaagttttgtatgggtttgatttaaggttgggggtttttaatggatttattaatttagtagttttgttttagttgttgttttgtgagttaaggttttttatttggaggtatgtgtttagtgttttttgggaaatttgttttttgtgatgggaggggaggaggaggtagtagtgatttgtagtttttgggagtttatatagtgttttgaggttagaatatatttattaattttatagagtttggttatgtttgtttatatggggagattgtagaaggttgtaggtagaagggtgtttatttggtttttagaattttttaattgtttatttttgtagggagatgggtttttttgtgttttttagttttaatggaatggagttaaagaagttgtgttgtagatgtttttatttttttataaattatagaaaatttttttgtgttttggtattattggtatgggtttggtttagggtatttggttaggattttttatattattttttaaaaaaggtgttatagtttgagtttttagagagttgtgtgttagaatattgggaatggatgggaatggtttgttgtgggagtagtttgttggttttagtatgggtaggtggtttaggatagaggttttggtgtttagtagatgtaaattttagtttttatgtagttttttattagttgtgttattttaggttttaggatagaaatgttaaagggtattggtggtattgtgtagtgggtagttggggagaaggggttgggggtaagtttatagaggaaaaatgtttatttgtttagtagttagagaaatgtatttaaaaatatatttaaggattagtt

SEQ ID NO: 4117 - DNA, 2489 bp, Artificial Sequence
  chemically treated genomic DNA (Homo sapiens)
tttatggttagggatagtgatattagtgtgtttattaagtatttgatttatttgtttaggtaaaattttagaagagatattgggatttgtgtggagagtttttttattgtagttattttgttaagtttattgtaaagtgatgaattttgtggatatttatagagaaaaaatagttttaaatgttatagattaatgttgtatgttgtagagatatagtttttgggttttgtgagttgtatttgggtattatgtagagtttagttgttatttgtttttttgaaggttagttaagaagttggttttagtttgggtatggtattattgttttatattttagttatttgggatattttgggtttaagtatttttttttattgttggattaagtattttttattttttgttttgggaaattagattttagtaggttattaattattttagaaagtttagtagagttggttttggtttgggggtgttttttgagttgggtggaagaagagattttatataattttttaattttttttttaaggttgaattttttataagtaaaattttaaaattttttttaaagaagaaaaatatttagataatttttaaaatttttttttagttttaagattgtgtaattttgtgatattagtattgaaagtttttgtatttttttaattatatatttttttatgttagggaaaggtgtatgtaagtgagagaataaaaaattttataattgtggggatttttttttttggttttggagtttttttttttttgtttttgtatggggtagttttttttttttgttttttttttttttttttgtttattaaattttttgtgttttagaattaaaaataaaaaataaaaatttaaaattatgattttaggggtgaaagaatattgagaaattatagaaagtaaaaatgaaaagttaatatagaaaaagtttgatttgaattagaagtagtatttaaaattataggtttagaaaaagtttgaatagaatttagggttgaggttagttttgagtttgtaggttttgtttttttataaaggtgagtagatgggtttggagagggttgtttatgttatggaagggtttttatgttattgaggttaaaattaaagtaggagtaaattagttttgttagtgtgtatagttggtattaaagaggtaataatggtagagaatattttttgaaagatatatatgaaattagtaatggtgatggtttttggaagaattaggttagaagtagatttaatttgtattgtgtatattttttggtattttttttaattgaatgtatgtgaatgtattatttatttaaaaataaatgtgtaaaaatatgtgttatgataaagtaaaatgaggagatagtataaaaaagataaggataattttaaattttttttaataaaatgttgtttaaaaatttaagaggaaaaaagggtaggttttagttagtggagagaataattgaaaaataagagttatgtgtttttatggttttggttaattttattttttttttatttttatttgtttatatttgttttggagtatttatagtaagtttggttttatgtttagaatattgtttggttttttttttttttttttgtttatatttttttagttatttgttgtttttttttttgttttttttttagtttttagtttgtttattaaattttaggtggtattttttattttttgttatgagggagtttatttgtttatgtaatttttttattggagataaaatgtattttttaaagttggtttgtaatgatattttttatgtttgttttgtttatttatgattttgatattttttttattgagagggtagaatttgtgttttttttttttgaatttaggtgggttatagttttggtagaagtgatattttgtgattttaaggttaggttataaaaagggaatgtagtttttgttagtaattttgggatatatatttggagtttgagttgttgtgtaagttatttgtttgttttgagtttattatattataaggaagtttaagttagtttataggagagatgaggtgaagagaatgagatgttagtttttattgttttagttttttagtgttttagttttagttattatttgattgtaattttatgaaagattgagttagaattatgagtttagttttttttgatgttgatatatagattttatgaaagagaataaattaatttttgttttaagttattatgatttgggatgatttgttatgtagtattggataattgtaatatttgtttttaaatagtagaattttaaatgtttaggttttatttttaatttattttatgtttttgtttttattgattttttgttattgagtttgattaagtttttgagttattaattttagatatttgtttaaataaatttattgtgattgtttatattatttatttttttaaaataatttttgttatagttggttttt

SEQ ID NO: 4118 - DNA, 2489 bp, Artificial Sequence
  chemically treated genomic DNA (Homo sapiens)
gaaggttaattataatagggattgttttggaggaatggatagtgtagatagttatagtgaatttgtttaaataaatatttggaattggtgatttaagggtttggttaagtttagtggtaaaaaattagtgagaataggaatatgaagtaagttagagatggggtttagatgtttgggattttattgtttagaagtaggtgttgtagttatttagtgttgtataataaattattttaaattatagtggtttaaagtaaaaattagtttatttttttttatgaagtttgtatgttaatattaggaagggttgggtttgtggttttggtttagttttttatggggttgtagttagatagtggttggggttgggatattagagagttggagtagtggagattggtattttattttttttattttgttttttttgtgggttagtttgggtttttttatagtgtggtgggtttagagtaggtagatggtttatatagtagtttgggttttaagtgtgtgttttaggattgttggtagaagttgtattttttttttgtgatttagttttaaggttatagagtgttatttttattagagttgtagtttatttagatttagagagaggaaatataggttttgtttttttgatggaaggagtgttaaagttatgggtaagtagagtaggtatgggagatgttattgtaagttaattttgggaaatatattttgtttttggtggggaaattgtatgaataaatgaatttttttatagtagagaatggagagtattatttgagatttgatgggtaaattgagaattgggagagaagtaagagaggaggtagtgagtgattgaggagatgtgggtagggagagaggaggaaagttaggtgatgttttgggtatgaagttaggtttgttgtgggtgttttaaggtagatgtgaatgagtgaggatgggaaagaagtggggttggttaggattatgggaatatgtggtttttgttttttagttgttttttttattagttggagtttatttttttttttttttagatttttaaatagtgttttattaggagaaatttaaaattatttttgttttttttatattgtttttttattttgttttgttgtggtatgtgtttttatatatttatttttgaataggtaatgtatttatatgtgtttaattaaaaaggatattaaagaatgtatatagtgtaaattaagtttgtttttgatttaatttttttagagattattgttgttattggttttatgtgtgttttttagaaaatattttttattgttgttgtttttttgatgttgattgtatatattagtagggttgatttgtttttgttttggttttagttttgatggtatagaggtttttttatagtatgaatagttttttttagatttatttatttatttttgtgagagggtagagtttgtagatttagggttgattttagttttggattttgtttaagttttttttgaatttgtaattttaagtgttgtttttaatttaagttagattttttttatgttggttttttatttttgttttttatggttttttagtgtttttttatttttaagattatgattttgaatttttattttttatttttggttttaaggtgtagagagtttagtagataagaaggaagggagaagatagaaggaaaaagttgttttgtatagagatagagggaagggggttttaaagttgaaagaagaggtttttatgattgtgaaattttttgtttttttatttatatgtatttttttttggtataggggaatatatagttagggaaatgtaggggtttttaatattggtattatagaattatatagttttggagttgaaaggggattttaaggattgtttgggtgttttttttttttaaaaaaaattttaaaattttgtttatagggaatttagttttagagaaaaagttaaaagattatataaggtttttttttttatttaatttaaaaaatatttttaaattaaaattaattttgttggattttttgggatggttgatgatttattgagatttgattttttagagtaggaggtgggaagtgtttgatttagtaatgggagggaatgtttgaatttaggatattttaaatggttggaatgtaggatagtggtattatgtttaggttgggattaattttttagttggtttttaaagggatagatggtagttgaattttgtgtaatgtttaaatatagtttatagaatttaaagattgtgtttttgtagtgtgtagtattggtttatagtatttgaagttattttttttttgtaagtgtttataaaatttgttattttataatgagtttggtaggatagttgtagtgaagaaattttttatataggttttagtgttttttttggaattttgtttgagtaagtaaattaaatatttggtaaatatattgatgttattgtttttagttatggg

SEQ ID NO: 4119 - DNA, 2417 bp, Artificial Sequence
  chemically treated genomic DNA (Homo sapiens)
gttgtttaggttggagtgtaatggtatgattttggtttattgtaatttttgtttgtattgaggtttaagtgatttttttgttttagtttttttagtagttgggattatagttatttgttattatgtttagttaatttttttgtgtatttttagtagagagggggttttattatgttggttaggttggttttaaatttttgattttaggtgatttatttgttttagttttttaaaatgttgggattataggtgtgagttattgtggttaattaggaatgaatatttttaaggtttttgatatatattgttaaatattttttaagattgtgttggtttattttttttttttagaattttgggtgtgggagtttagaggttgttggtttgtttttagtaggtaaagatgttatttattttttaggaaggaagtgtagtagtttttgagtgttataggttttgtttttgtgggtgttggagtgtgtttggtgttgtttttttttaggtttagatattatttgttggtggtggatgtttgtaattattgtggttattagttggttttagggagatgatgtagttgtgtgtttttattttattaaagtggaatgtatttttaaggttttggaagtgatagagtgtgtaattttttttggttatttatttgtttttttttaggggaattttgtttgagttagtaggagtaaattggattgggtgggtgtgttggggtgaagggttaggattgtatgataggtgggtggttagaaaagttgggggtgagggtattatggagaatttaagttgggttagtaggttttttgtgtaagtgttttgttttgtataatatgatagttgttttagtagttgttagtattgtgtttgggtttttttttttgtagtttttatggtgttataggttgaaaagaagagatgagagtagtgtggtttttagtatttttagaagttttgtggtggaggtaggtattggtggtttataattagtgtagagaggttattgttgtttttaaaatttatgtgtattggagtattttgtttttgtgtgttagtattttatttattttttttttagttatttttatttttattattaattttggtaattttgttttgtaattaaaatagtttttagtatatggtataattggagagtttttgatatttttttttggagatttatgtttgtgttttgggggtatttggtattagtgatgggtagttttgtttgttgattttttggttgtttttaattggatttgagtattttaagagaaattgtaaaatgttttaagatagaaaggttttatgaggttttatttttagagttaaggttgtagtattttttattaagtagatttttaattggtgtataggaaggagttgagaagagtgagtatatataggtttgaagttttttgttttttgaagtagatgtgatattttaattttattgaagtagttttatttgtaagtattttgattaggtaagtatttagtttggtatagtattttatttgtatgtgtgttttttttagttgatgtgtttgaggatattgagatttagtaggtaagttgtttaaagttattttgttttagagtagtagagtttttatggatagttaagatatttttgtaggtattgttgtttgttggatttatttatttttgggtttttttgttttttagggattaggatgttatgagaatttttttttatttttagtttttttttttatttttagttttttttatagaaagaagttaattaagtatttttagagagtttaatattatatttttgggggggtggttttttaaagaatgggtataatattttattgtggttattttataggtaaggaaattgaggtatatgttggaatgattattttgggtggttttttagtagtagatgtgatggtgaagtttgtgtttttgatttttagtattgaatgaaggtgttaaagggtggggtgttaattttagtttagggttggtattttagatttggagttggtggtatggtgttatagtggtagtattggagttaatagatgtatatgttatattagtgtggggtgtggtagttattggtttgggtttttttgtttgttatgtaggtgatatatagtgatttgttttttgattttttgttattgttgtaggagttttttggtgaaggttattttttatgtttgtagagttatgtatgttttattttttgggaaagtagatgggtagtagagttttttttgttattgtgagagggttagtggttatttatggagtagttttaatgttagtggggttatttttgattttgtttttaattatgtgagtgggagttgagttggtttttgggggaggtgttttgtattggtttatgagaatatttttat

SEQ ID NO: 4120 - DNA, 2417 bp, Artificial Sequence
  chemically treated genomic DNA (Homo sapiens)
gtgggagtgtttttgtaaattagtgtagagtattttttttaggggttaatttagtttttatttatgtggttgagggtagggttagaggtggttttattgatgttgaggttgttttataggtggttattggtttttttgtaatggtagaaggaattttgttgtttatttgtttttttagggagtgaggtatgtatggttttgtaggtatggaagatggtttttattagggggtttttgtagtagtgatagggagttgagaggtaggttattatgtgttatttgtgtgataggtagaggggtttaagttagtgattgttatgttttatattgatatgatatgtgtatttgttgattttaatgttgttattatggtattatgttattagttttagatttgaaatgttagttttgagttagggttagtgttttattttttagtatttttatttaatgttggaagttagagatataggttttattattatgtttgttgttaagaagttatttaagatagttattttaatgtgtgttttagtttttttatttataaagtggttataataaggtgttgtatttgttttttaagggattatttttttagagatgtggtattaaattttttggagatatttagttagtttttttttgtagaggagattgggagtggaaggggaggttagggatgggggagggtttttatagtattttagtttttgaaaagtagagggatttaggggtaagtgaatttagtaggtagtagtgtttgtaggggtgttttggttgtttatggaagttttgttgttttggagtgaggtgattttggataatttatttgttgagttttagtgtttttaggtatattgattgggggagatatatatataggtggaatgttatattgggttgggtgtttatttagttagagtgtttataaatggggttattttaatgaaattagggtgttatatttattttagggaataaaggattttaagtttgtgtatatttattttttttagtttttttttgtgtgttggttaagggtttgtttgataggaaatgttatagttttggttttaaggataggattttgtggggtttttttgttttggagtattttatagttttttttagaatatttagatttaattagaaatagttggggagttagtaggtagggttgtttattattagtgttgaatgtttttaagatgtagatatgaatttttaaagaggaatgttaaaagttttttggttatgttatgtgttaaaggttattttagttataggataaagttgttagggttgatggtgggggtggaggtggttggaaggaaagtggataaaatgttagtatataggggtaagatgttttagtgtatatgagttttgggggtaatagtggtttttttgtattgattgtgaattattagtgtttgtttttattataaagtttttgaagatgttgggggttatattgtttttgttttttttttttagtttgtggtgttatgaaggttgtagggaggaggatttggatatagtgttgatagttgttgggataattgttgtgttgtgtagagtaggatatttgtatagaggatttgttggtttaatttgagttttttatggtgtttttatttttgatttttttagttgtttatttgttatgtagttttgattttttattttaatatgtttatttagtttagtttgtttttgttaatttaaataagatttttttggagagaagtaagtgagtggttaaggagggttatgtattttgttatttttagggttttggggatgtgttttattttggtaaaatgagagtgtatagttgtattgtttttttggagttagttgatggttatagtgattgtagatgtttattattgatagatgatgtttggatttagaggagaatagtattaaatgtattttagtatttatagaaatgagatttgtggtgtttagaggttgttatattttttttttaggagatgggtaatatttttgtttgttgggaatgggttagtagtttttgggtttttatatttaggattttgggggaggggaatagattagtataattttggaaagtgtttggtaatatatattaagagttttaaaaatgtttatttttggttggttgtggtggtttatgtttgtaattttagtattttgggaggttgaggtaggtggattatttgaggttaggagtttgagattagtttggttaatatggtgaaattttttttttattaaaaatatataaaaaaattagttgggtatggtggtgggtgattgtaattttagttattagggaggttgaggtaagagaattgtttgaattttggtgtgggtggaggttgtagtgagttgagattgtgttattgtattttagtttgggtaat

SEQ ID NO: 4121 - DNA, 21 bp, Artificial Sequence
  oligonucleotide 825
ttgttgattggatagatggat

SEQ ID NO: 4122 - DNA, 22 bp, Artificial Sequence
  oligonucleotide 826
caaaccttcccaattactaaaa

SEQ ID NO: 4123 - DNA, 23 bp, Artificial Sequence
  oligonucleotide 827
gggataggatttattgtaaggtt

SEQ ID NO: 4124 - DNA, 22 bp, Artificial Sequence
  oligonucleotide 828
taaaactctactcaccaaccaa

SEQ ID NO: 4125 - DNA, 22 bp, Artificial Sequence
  oligonucleotide 835
aagttgtaggtggatggagtag

SEQ ID NO: 4126 - DNA, 24 bp, Artificial Sequence
  oligonucleotide 836
accctcaaaaatataacataacct

SEQ ID NO: 4127 - DNA, 21 bp, Artificial Sequence
  oligonucleotide 897
gggagaaagaggattagatga

SEQ ID NO: 4128 - DNA, 22 bp, Artificial Sequence
  oligonucleotide 898
ccctaacaaactccaaataaac

SEQ ID NO: 4129 - DNA, 21 bp, Artificial Sequence
  oligonucleotide 911
agggatatggtttgggtataa

SEQ ID NO: 4130 - DNA, 22 bp, Artificial Sequence
  oligonucleotide 912
cacaataactccccaattaaaa

SEQ ID NO: 4131 - DNA, 22 bp, Artificial Sequence
  oligonucleotide 1251
taataggatgttggtagggatt

SEQ ID NO: 4132 - DNA, 22 bp, Artificial Sequence
  oligonucleotide 1252
tctccacctttctaactacctt

SEQ ID NO: 4133 - DNA, 20 bp, Artificial Sequence
  oligonucleotide 9567
ggaggaagtgggttttgtat

SEQ ID NO: 4134 - DNA, 26 bp, Artificial Sequence
  oligonucleotide 9568
atacccctacccttaactaaataatc

SEQ ID NO: 4135 - DNA, 22 bp, Artificial Sequence
  oligonucleotide 9569
tttttgtgggtaggagaataag

SEQ ID NO: 4136 - DNA, 23 bp, Artificial Sequence
  oligonucleotide 9570
tcatattaaaaaccaaaccctac

SEQ ID NO: 4137 - DNA, 22 bp, Artificial Sequence
  oligonucleotide 9711
gttgtgttttaattggtaaggg

SEQ ID NO: 4138 - DNA, 22 bp, Artificial Sequence
  oligonucleotide 9712
caccaaccataaaatccttatt

SEQ ID NO: 4139 - DNA, 23 bp, Artificial Sequence
  oligonucleotide 9719
atgataattttgtgtttttggtg

SEQ ID NO: 4140 - DNA, 27 bp, Artificial Sequence
  oligonucleotide 9720
aacatactttcacttcatttaatccta

SEQ ID NO: 4141 - DNA, 22 bp, Artificial Sequence
  oligonucleotide 9721
gtagagtgggtagggtgaaata

SEQ ID NO: 4142 - DNA, 22 bp, Artificial Sequence
  oligonucleotide 9722
tataacccaaacaaccacctaa

SEQ ID NO: 4143 - DNA, 22 bp, Artificial Sequence
  oligonucleotide 9767
ggtttgaggagagtgattttta

SEQ ID NO: 4144 - DNA, 25 bp, Artificial Sequence
  oligonucleotide 9768
caactactactatcacattaaccca

SEQ ID NO: 4145 - DNA, 22 bp, Artificial Sequence
  oligonucleotide 9777
tttttggaatgatttagggtag

SEQ ID NO: 4146 - DNA, 18 bp, Artificial Sequence
  oligonucleotide 9778
aacaacccctcctcatca

SEQ ID NO: 4147 - DNA, 26 bp, Artificial Sequence
  oligonucleotide 9833
attttgtttttagagatagggatagt

SEQ ID NO: 4148 - DNA, 22 bp, Artificial Sequence
  oligonucleotide 9834
catcttcacctacaccatttta

SEQ ID NO: 4149 - DNA, 21 bp, Artificial Sequence
  oligonucleotide 9849
atttgtagtttggggtgattt

SEQ ID NO: 4150 - DNA, 23 bp, Artificial Sequence
  oligonucleotide 9850
aataatttcctaacccactatcc

SEQ ID NO: 4151 - DNA, 22 bp, Artificial Sequence
  oligonucleotide 9871
ggtaggattttagaaaggaagg

SEQ ID NO: 4152 - DNA, 18 bp, Artificial Sequence
  oligonucleotide 9872
attccccactactcccaa

SEQ ID NO: 4153 - DNA, 21 bp, Artificial Sequence
  oligonucleotide 9889
ttttgttttggtgataggaga

SEQ ID NO: 4154 - DNA, 19 bp, Artificial Sequence
  oligonucleotide 9890
actccatccaacccctaat

SEQ ID NO: 4155 - DNA, 22 bp, Artificial Sequence
  oligonucleotide 9917
ttaggttgtaggaggagtttgt

SEQ ID NO: 4156 - DNA, 22 bp, Artificial Sequence
  oligonucleotide 9918
tcttatcatcttccattccaac

SEQ ID NO: 4157 - DNA, 20 bp, Artificial Sequence
  oligonucleotide 9953
gtagggatatgggggttgta

SEQ ID NO: 4158 - DNA, 22 bp, Artificial Sequence
  oligonucleotide 9954
ttcttatcctctccaccaacta

SEQ ID NO: 4159 - DNA, 23 bp, Artificial Sequence
  oligonucleotide 10031
atatttgtttttgatgatggaag

SEQ ID NO: 4160 - DNA, 22 bp, Artificial Sequence
  oligonucleotide 10032
aacctactcacccctcttctta

SEQ ID NO: 4161 - DNA, 22 bp, Artificial Sequence
  oligonucleotide 10077
tttggaaggaattaggttttat

SEQ ID NO: 4162 - DNA, 22 bp, Artificial Sequence
  oligonucleotide 10078
aaaatcccctattactcatcct

SEQ ID NO: 4163 - DNA, 23 bp, Artificial Sequence
  oligonucleotide 10085
aggatattaaggagaatttggaa

SEQ ID NO: 4164 - DNA, 18 bp, Artificial Sequence
  oligonucleotide 10086
tccttccccacctcatac

SEQ ID NO: 4165 - DNA, 22 bp, Artificial Sequence
  oligonucleotide 10105
taggggagttgttaggattaag

SEQ ID NO: 4166 - DNA, 18 bp, Artificial Sequence
  oligonucleotide 10106
acccaaccaatcacaaaa

SEQ ID NO: 4167 - DNA, 22 bp, Artificial Sequence
  oligonucleotide 10111
ttagtaatagtgaagggaggga

SEQ ID NO: 4168 - DNA, 22 bp, Artificial Sequence
  oligonucleotide 10112
acacataatctccccaaaatac

SEQ ID NO: 4169 - DNA, 22 bp, Artificial Sequence
  oligonucleotide 10225
ttttgaaggagtattaggtgga

SEQ ID NO: 4170 - DNA, 22 bp, Artificial Sequence
  oligonucleotide 10226
aacaccctactcaacatcctat

SEQ ID NO: 4171 - DNA, 26 bp, Artificial Sequence
  oligonucleotide 10489
ggttaaagaatttgagggtattttat

SEQ ID NO: 4172 - DNA, 20 bp, Artificial Sequence
  oligonucleotide 10490
atcctctaaacccctaccaa

SEQ ID NO: 4173 - DNA, 20 bp, Artificial Sequence
  oligonucleotide 10565
tgtttagttttgggggaaat

SEQ ID NO: 4174 - DNA, 26 bp, Artificial Sequence
  oligonucleotide 10566
cccctactttacatattcataaaatc

SEQ ID NO: 4175 - DNA, 22 bp, Artificial Sequence
  oligonucleotide 10569
aggttgtaaaagtatttggtgg

SEQ ID NO: 4176 - DNA, 21 bp, Artificial Sequence
  oligonucleotide 10570
atcttcaaaaacatcccctta

SEQ ID NO: 4177 - DNA, 22 bp, Artificial Sequence
  oligonucleotide 11419
ttttggtttgattgagtattga

SEQ ID NO: 4178 - DNA, 18 bp, Artificial Sequence
  oligonucleotide 11420
tcctctcccacaaaatcc

SEQ ID NO: 4179 - DNA, 23 bp, Artificial Sequence
  oligonucleotide 11449
atgataattttgtgtttttggtg

SEQ ID NO: 4180 - DNA, 27 bp, Artificial Sequence
  oligonucleotide 11450
aacatactttcacttcatttaatccta

SEQ ID NO: 4181 - DNA, 22 bp, Artificial Sequence
  oligonucleotide 11461
ttgagggtagatttttaaggtt

SEQ ID NO: 4182 - DNA, 20 bp, Artificial Sequence
  oligonucleotide 11462
caactccaaatccctcctac

SEQ ID NO: 4183 - DNA, 23 bp, Artificial Sequence
  oligonucleotide 11487
atttgggtttaggattttgtatt

SEQ ID NO: 4184 - DNA, 21 bp, Artificial Sequence
  oligonucleotide 11488
tctcccaattcctttctaatc

SEQ ID NO: 4185 - DNA, 25 bp, Artificial Sequence
  oligonucleotide 11575
taaagtttgatagagaaggatgatt

SEQ ID NO: 4186 - DNA, 23 bp, Artificial Sequence
  oligonucleotide 11576
caaccttaaataaaacctcaaca

SEQ ID NO: 4187 - DNA, 22 bp, Artificial Sequence
  oligonucleotide 11633
ttttaggattaggtttatggga

SEQ ID NO: 4188 - DNA, 21 bp, Artificial Sequence
  oligonucleotide 11634
acctccacctaccacaactat

SEQ ID NO: 4189 - DNA, 22 bp, Artificial Sequence
  oligonucleotide 11649
ggtggtatagaggaaggtgtta

SEQ ID NO: 4190 - DNA, 21 bp, Artificial Sequence
  oligonucleotide 11650
aaaccaaaaatcccacaaata

SEQ ID NO: 4191 - DNA, 22 bp, Artificial Sequence
  oligonucleotide 11707
tgtttttattgggtagggtaaa

SEQ ID NO: 4192 - DNA, 22 bp, Artificial Sequence
  oligonucleotide 11708
aaccaaaaccacaatttctaac

SEQ ID NO: 4193 - DNA, 21 bp, Artificial Sequence
  oligonucleotide 11747
ggggagaaatgaaagtattga

SEQ ID NO: 4194 - DNA, 23 bp, Artificial Sequence
  oligonucleotide 11748
cccaacactcaaatataataacc

SEQ ID NO: 4195 - DNA, 24 bp, Artificial Sequence
  oligonucleotide 11795
tttatatgatttagtggatgggta

SEQ ID NO: 4196 - DNA, 19 bp, Artificial Sequence
  oligonucleotide 11796
atatctaaaaccccctccc

SEQ ID NO: 4197 - DNA, 22 bp, Artificial Sequence
  oligonucleotide 11807
gttgtgagtttgttagaaggtg

SEQ ID NO: 4198 - DNA, 21 bp, Artificial Sequence
  oligonucleotide 11808
aaccaaaatccccataataaa

SEQ ID NO: 4199 - DNA, 18 bp, Artificial Sequence
  oligonucleotide 11809
tttttggggaagattggt

SEQ ID NO: 4200 - DNA, 22 bp, Artificial Sequence
  oligonucleotide 11810
tcatctacaaccctaaatctca

SEQ ID NO: 4201 - DNA, 22 bp, Artificial Sequence
  oligonucleotide 11819
tttttggttagatttggagttt

SEQ ID NO: 4202 - DNA, 22 bp, Artificial Sequence
  oligonucleotide 11820
tttaccccaacattttattctc

SEQ ID NO: 4203 - DNA, 27 bp, Artificial Sequence
  oligonucleotide 11839
ttagtagattttgagttagagaaggtt

SEQ ID NO: 4204 - DNA, 19 bp, Artificial Sequence
  oligonucleotide 11840
aaaaacaacccctcctcat

SEQ ID NO: 4205 - DNA, 21 bp, Artificial Sequence
  oligonucleotide 11843
tattgggttggaaaatagagg

SEQ ID NO: 4206 - DNA, 22 bp, Artificial Sequence
  oligonucleotide 11844
tccttcctcaactacctaaaaa

SEQ ID NO: 4207 - DNA, 22 bp, Artificial Sequence
  oligonucleotide 11863
tttgttgggtatagtgggtaat

SEQ ID NO: 4208 - DNA, 21 bp, Artificial Sequence
  oligonucleotide 11864
actctctccttcctaaaacca

SEQ ID NO: 4209 - DNA, 22 bp, Artificial Sequence
  oligonucleotide 11865
ggagatggttgatgtttagaat

SEQ ID NO: 4210 - DNA, 19 bp, Artificial Sequence
  oligonucleotide 11866
cttttatttcctcccaccc

SEQ ID NO: 4211 - DNA, 24 bp, Artificial Sequence
  oligonucleotide 11869
taggaggtagatttttatttggtt

SEQ ID NO: 4212 - DNA, 18 bp, Artificial Sequence
  oligonucleotide 11870
actaaacccaacccctcc

SEQ ID NO: 4213 - DNA, 22 bp, Artificial Sequence
  oligonucleotide 11873
aggtttgtaatggtgttggtat

SEQ ID NO: 4214 - DNA, 23 bp, Artificial Sequence
  oligonucleotide 11874
acaaccatcatctcctaaaataa

SEQ ID NO: 4215 - DNA, 22 bp, Artificial Sequence
  oligonucleotide 11901
atgaatagggttttgttttgag

SEQ ID NO: 4216 - DNA, 19 bp, Artificial Sequence
  oligonucleotide 11902
ttaatatcctcccccaacc

SEQ ID NO: 4217 - DNA, 25 bp, Artificial Sequence
  oligonucleotide 11903
aggtatatttgtttagtttttggtt

SEQ ID NO: 4218 - DNA, 22 bp, Artificial Sequence
  oligonucleotide 11904
acatcaatccctcaactctaat

SEQ ID NO: 4219 - DNA, 22 bp, Artificial Sequence
  oligonucleotide 11905
ggttttattgtgagggaaatta

SEQ ID NO: 4220 - DNA, 22 bp, Artificial Sequence
  oligonucleotide 11906
tcacccaaatcatctctttact

SEQ ID NO: 4221 - DNA, 20 bp, Artificial Sequence
  oligonucleotide 11921
tttttggggaaaagatgatt

SEQ ID NO: 4222 - DNA, 23 bp, Artificial Sequence
  oligonucleotide 11922
ccctactactcaaaactctacca

SEQ ID NO: 4223 - DNA, 21 bp, Artificial Sequence
  oligonucleotide 11933
aggtgtggatttaggttttgt

SEQ ID NO: 4224 - DNA, 22 bp, Artificial Sequence
  oligonucleotide 11934
cccacaaactctttcttctcta

SEQ ID NO: 4225 - DNA, 21 bp, Artificial Sequence
  oligonucleotide 11949
tgtgtggaattagggattagg

SEQ ID NO: 4226 - DNA, 22 bp, Artificial Sequence
  oligonucleotide 11950
caaataaatacactctcccctc

SEQ ID NO: 4227 - DNA, 22 bp, Artificial Sequence
  oligonucleotide 11961
ggttaagattttgattggtttt

SEQ ID NO: 4228 - DNA, 22 bp, Artificial Sequence
  oligonucleotide 11962
caactccacttaccctacctac

SEQ ID NO: 4229 - DNA, 22 bp, Artificial Sequence
  oligonucleotide 11971
ggtaatttattggggtatttga

SEQ ID NO: 4230 - DNA, 22 bp, Artificial Sequence
  oligonucleotide 11972
caaacataatccatcctctctt

SEQ ID NO: 4231 - DNA, 22 bp, Artificial Sequence
  oligonucleotide 11973
tttttggttaaggatgtttagg

SEQ ID NO: 4232 - DNA, 20 bp, Artificial Sequence
  oligonucleotide 11974
caaaatctccaactccacac

SEQ ID NO: 4233 - DNA, 22 bp, Artificial Sequence
  oligonucleotide 12039
tgtagagtgtgtttttggtagg

SEQ ID NO: 4234 - DNA, 22 bp, Artificial Sequence
  oligonucleotide 12040
tcactcctcatttatccttctt

SEQ ID NO: 4235 - DNA, 22 bp, Artificial Sequence
  oligonucleotide 12053
tgggattatgtgagatattttg

SEQ ID NO: 4236 - DNA, 23 bp, Artificial Sequence
  oligonucleotide 12054
ttccactccttatcctaaactaa

SEQ ID NO: 4237 - DNA, 22 bp, Artificial Sequence
  oligonucleotide 12059
atatttgttttggaagagagga

SEQ ID NO: 4238 - DNA, 22 bp, Artificial Sequence
  oligonucleotide 12060
acctcatatctaaatcccaacc

SEQ ID NO: 4239 - DNA, 19 bp, Artificial Sequence
  oligonucleotide 12071
tttggaaatgtgttttggg

SEQ ID NO: 4240 - DNA, 20 bp, Artificial Sequence
  oligonucleotide 12072
tccaatcccatcctactaac

SEQ ID NO: 4241 - DNA, 20 bp, Artificial Sequence
  oligonucleotide 12077
gggttgttagggattgagtt

SEQ ID NO: 4242 - DNA, 27 bp, Artificial Sequence
  oligonucleotide 12078
cctactatcctaaactctctcttattc

SEQ ID NO: 4243 - DNA, 19 bp, Artificial Sequence
  oligonucleotide 12091
ttttgaggggttgaattgt

SEQ ID NO: 4244 - DNA, 23 bp, Artificial Sequence
  oligonucleotide 12092
ttatctatcctaaacaaaaccca

SEQ ID NO: 4245 - DNA, 20 bp, Artificial Sequence
  oligonucleotide 12095
gggtatttggggtttgttag

SEQ ID NO: 4246 - DNA, 23 bp, Artificial Sequence
  oligonucleotide 12096
ccctaacctaacttcctctttat

SEQ ID NO: 4247 - DNA, 22 bp, Artificial Sequence
  oligonucleotide 12097
gatgaggatggtatttaggatg

SEQ ID NO: 4248 - DNA, 25 bp, Artificial Sequence
  oligonucleotide 12098
tctcctactctaatcaaaaacctta

SEQ ID NO: 4249 - DNA, 22 bp, Artificial Sequence
  oligonucleotide 12129
ttggttttatggtgtagtttgt

SEQ ID NO: 4250 - DNA, 22 bp, Artificial Sequence
  oligonucleotide 12130
aaaacaaccctaccttattcac

SEQ ID NO: 4251 - DNA, 25 bp, Artificial Sequence
  oligonucleotide 12131
tggattagtaaggtttaagttgttt

SEQ ID NO: 4252 - DNA, 19 bp, Artificial Sequence
  oligonucleotide 12132
cctacctccccctaaaaat

SEQ ID NO: 4253 - DNA, 24 bp, Artificial Sequence
  oligonucleotide 12139
ggaagtagggtatttgatatgttt

SEQ ID NO: 4254 - DNA, 22 bp, Artificial Sequence
  oligonucleotide 12140
caatttacaaacctcctcctaa

SEQ ID NO: 4255 - DNA, 22 bp, Artificial Sequence
  oligonucleotide 12141
tggggttaagtttattttatgg

SEQ ID NO: 4256 - DNA, 22 bp, Artificial Sequence
  oligonucleotide 12142
acccctcctcaactatctctac

SEQ ID NO: 4257 - DNA, 20 bp, Artificial Sequence
  oligonucleotide 12189
gagttggttggggattttta

SEQ ID NO: 4258 - DNA, 22 bp, Artificial Sequence
  oligonucleotide 12190
atatccacactctccctcctac

SEQ ID NO: 4259 - DNA, 22 bp, Artificial Sequence
  oligonucleotide 12191
taggggaagtagagaatgaaga

SEQ ID NO: 4260 - DNA, 22 bp, Artificial Sequence
  oligonucleotide 12192
ctcaaaaataatccccaaatac

SEQ ID NO: 4261 - DNA, 22 bp, Artificial Sequence
  oligonucleotide 12193
tatagaggaaggagagttttgg

SEQ ID NO: 4262 - DNA, 25 bp, Artificial Sequence
  oligonucleotide 12194
aattctactctaatcaacctcaatc

SEQ ID NO: 4263 - DNA, 23 bp, Artificial Sequence
  oligonucleotide 12195
agggttattgtgttgtaattgtt

SEQ ID NO: 4264 - DNA, 22 bp, Artificial Sequence
  oligonucleotide 12196
tcctcatcttcacatacaccta

SEQ ID NO: 4265 - DNA, 19 bp, Artificial Sequence
  oligonucleotide 12197
gatatgtgtgggagggatg

SEQ ID NO: 4266 - DNA, 24 bp, Artificial Sequence
  oligonucleotide 12198
cataaaaccaaaactcaaatctaa

SEQ ID NO: 4267 - DNA, 21 bp, Artificial Sequence
  oligonucleotide 12199
attttgaggatgtgaggtagg

SEQ ID NO: 4268 - DNA, 22 bp, Artificial Sequence
  oligonucleotide 12200
aaaaataaatcacactatcccc

SEQ ID NO: 4269 - DNA, 22 bp, Artificial Sequence
  oligonucleotide 12207
agagggggtagagatttatttg

SEQ ID NO: 4270 - DNA, 22 bp, Artificial Sequence
  oligonucleotide 12208
ccccactataacctcaaaacta

SEQ ID NO: 4271 - DNA, 21 bp, Artificial Sequence
  oligonucleotide 12209
gggagtttaggattgttgatt

SEQ ID NO: 4272 - DNA, 22 bp, Artificial Sequence
  oligonucleotide 12210
tatctcaaaacccaccttaaaa

SEQ ID NO: 4273 - DNA, 22 bp, Artificial Sequence
  oligonucleotide 12211
taggtttagagagtttggagga

SEQ ID NO: 4274 - DNA, 22 bp, Artificial Sequence
  oligonucleotide 12212
taaattctaactcaaccccaac

SEQ ID NO: 4275 - DNA, 22 bp, Artificial Sequence
  oligonucleotide 12213
ggagtttttgttagattggaga

SEQ ID NO: 4276 - DNA, 23 bp, Artificial Sequence
  oligonucleotide 12214
aactaacctttatccctaaaacc

SEQ ID NO: 4277 - DNA, 21 bp, Artificial Sequence
  oligonucleotide 12215
agtaagtagggaggggttgag

SEQ ID NO: 4278 - DNA, 22 bp, Artificial Sequence
  oligonucleotide 12216
accaatcccaaaactaataacc

SEQ ID NO: 4279 - DNA, 24 bp, Artificial Sequence
  oligonucleotide 12217
tgttatagatggtgatatggagtt

SEQ ID NO: 4280 - DNA, 21 bp, Artificial Sequence
  oligonucleotide 12218
ttctatccttccactcctcac

SEQ ID NO: 4281 - DNA, 20 bp, Artificial Sequence
  oligonucleotide 12311
atagataaagaggatggggg

SEQ ID NO: 4282 - DNA, 23 bp, Artificial Sequence
  oligonucleotide 12312
acctatccctaacattcctaaac

SEQ ID NO: 4283 - DNA, 23 bp, Artificial Sequence
  oligonucleotide 12317
ttgttttgtagatagtagggtgg

SEQ ID NO: 4284 - DNA, 27 bp, Artificial Sequence
  oligonucleotide 12318
cacaatataatacctaactccttcata

SEQ ID NO: 4285 - DNA, 19 bp, Artificial Sequence
  oligonucleotide 12335
gattgggtttggtgatttt

SEQ ID NO: 4286 - DNA, 25 bp, Artificial Sequence
  oligonucleotide 12336
aacctctatctttccaaaactataa

SEQ ID NO: 4287 - DNA, 21 bp, Artificial Sequence
  oligonucleotide 12351
tttttatggtgtgggtttagg

SEQ ID NO: 4288 - DNA, 21 bp, Artificial Sequence
  oligonucleotide 12352
caaccctttaattctttccaa

SEQ ID NO: 4289 - DNA, 22 bp, Artificial Sequence
  oligonucleotide 12359
ggaggaggaagatgaatagtgt

SEQ ID NO: 4290 - DNA, 22 bp, Artificial Sequence
  oligonucleotide 12360
tcaacataccaacctaaacaaa

SEQ ID NO: 4291 - DNA, 23 bp, Artificial Sequence
  oligonucleotide 12377
tggattttatttgtttgagttgt

SEQ ID NO: 4292 - DNA, 26 bp, Artificial Sequence
  oligonucleotide 12378
ctactacattacaaaaactacccctt

SEQ ID NO: 4293 - DNA, 24 bp, Artificial Sequence
  oligonucleotide 12479
agggatagttaagttgagtaagga

SEQ ID NO: 4294 - DNA, 24 bp, Artificial Sequence
  oligonucleotide 12480
ccctaataatatctaacctccaat

SEQ ID NO: 4295 - DNA, 22 bp, Artificial Sequence
  oligonucleotide 12513
ggaaattagggtttttaggttt

SEQ ID NO: 4296 - DNA, 22 bp, Artificial Sequence
  oligonucleotide 12514
cctactctctcctctaaccaca

SEQ ID NO: 4297 - DNA, 22 bp, Artificial Sequence
  oligonucleotide 12525
tttttagtttggaggaggtaga

SEQ ID NO: 4298 - DNA, 25 bp, Artificial Sequence
  oligonucleotide 12526
aaaaacaacatctactacataaccc

SEQ ID NO: 4299 - DNA, 21 bp, Artificial Sequence
  oligonucleotide 12563
tgtaagggagtggtgattttt

SEQ ID NO: 4300 - DNA, 22 bp, Artificial Sequence
  oligonucleotide 12564
ccccaattccatatactctcat

SEQ ID NO: 4301 - DNA, 22 bp, Artificial Sequence
  oligonucleotide 12577
taggaatgagttggtattggag

SEQ ID NO: 4302 - DNA, 21 bp, Artificial Sequence
  oligonucleotide 12578
cctctatctacccaccctaaa

SEQ ID NO: 4303 - DNA, 25 bp, Artificial Sequence
  oligonucleotide 12595
ggagtatggtttgtttagtgttaga

SEQ ID NO: 4304 - DNA, 23 bp, Artificial Sequence
  oligonucleotide 12596
aaactcaaattctcctaacttca

SEQ ID NO: 4305 - DNA, 19 bp, Artificial Sequence
  oligonucleotide 12621
ttggtttggagaggtgttt

SEQ ID NO: 4306 - DNA, 18 bp, Artificial Sequence
  oligonucleotide 12622
ctacccctttaccccaca

SEQ ID NO: 4307 - DNA, 27 bp, Artificial Sequence
  oligonucleotide 12623
ttaattgtattgtaatgagaggattta

SEQ ID NO: 4308 - DNA, 22 bp, Artificial Sequence
  oligonucleotide 12624
tccaaaataaaaaccatatcca

SEQ ID NO: 4309 - DNA, 21 bp, Artificial Sequence
  oligonucleotide 12627
ttattttgggtaagttgggtt

SEQ ID NO: 4310 - DNA, 24 bp, Artificial Sequence
  oligonucleotide 12628
cctaccataactacctctatccct

SEQ ID NO: 4311 - DNA, 23 bp, Artificial Sequence
  oligonucleotide 12677
tggttatgtgtttaagaatgttg

SEQ ID NO: 4312 - DNA, 18 bp, Artificial Sequence
  oligonucleotide 12678
accccatttccttcctaa

SEQ ID NO: 4313 - DNA, 20 bp, Artificial Sequence
  oligonucleotide 12679
gggtaatgaggggaagttag

SEQ ID NO: 4314 - DNA, 22 bp, Artificial Sequence
  oligonucleotide 12680
aacctatactccaaaacctcca

SEQ ID NO: 4315 - DNA, 25 bp, Artificial Sequence
  oligonucleotide 12699
ttggagtattgtattatagtgggta

SEQ ID NO: 4316 - DNA, 22 bp, Artificial Sequence
  oligonucleotide 12700
caaaaccctatcctatatcacc

SEQ ID NO: 4317 - DNA, 27 bp, Artificial Sequence
  oligonucleotide 12711
atagagaatttagtgtgaagaaaagat

SEQ ID NO: 4318 - DNA, 21 bp, Artificial Sequence
  oligonucleotide 12712
tttaccttcatttcaccttcc

SEQ ID NO: 4319 - DNA, 22 bp, Artificial Sequence
  oligonucleotide 12715
ttggtagtatttgggaagtttt

SEQ ID NO: 4320 - DNA, 22 bp, Artificial Sequence
  oligonucleotide 12716
taaacaacctcacacacctctt

SEQ ID NO: 4321 - DNA, 22 bp, Artificial Sequence
  oligonucleotide 12849
ggaggatagataagtgaagggt

SEQ ID NO: 4322 - DNA, 22 bp, Artificial Sequence
  oligonucleotide 12850
tcaaaaactcttaaaaacccaa

SEQ ID NO: 4323 - DNA, 24 bp, Artificial Sequence
  oligonucleotide 12901
aaatagttggttaagaggaaagat

SEQ ID NO: 4324 - DNA, 25 bp, Artificial Sequence
  oligonucleotide 12902
ttaaaactcacctacattaaattcc

SEQ ID NO: 4325 - DNA, 19 bp, Artificial Sequence
  oligonucleotide 12915
gggaaggttttgagaagtg

SEQ ID NO: 4326 - DNA, 26 bp, Artificial Sequence
  oligonucleotide 12916
aaaactataccatcctaactacaaca

SEQ ID NO: 4327 - DNA, 20 bp, Artificial Sequence
  oligonucleotide 12943
tttttgattgaggatggttt

SEQ ID NO: 4328 - DNA, 22 bp, Artificial Sequence
  oligonucleotide 12944
aaacatatcatctccttcacct

SEQ ID NO: 4329 - DNA, 22 bp, Artificial Sequence
  oligonucleotide 12965
taggatttgtagaattggttga

SEQ ID NO: 4330 - DNA, 22 bp, Artificial Sequence
  oligonucleotide 12966
tttctatctctccaactatccc

SEQ ID NO: 4331 - DNA, 20 bp, Artificial Sequence
  oligonucleotide 12981
atttagtggagttggggaag

SEQ ID NO: 4332 - DNA, 24 bp, Artificial Sequence
  oligonucleotide 12982
tccaatcacaacctaataataaaa

SEQ ID NO: 4333 - DNA, 22 bp, Artificial Sequence
  oligonucleotide 13035
ttttgattgtgaaaagggtatt

SEQ ID NO: 4334 - DNA, 18 bp, Artificial Sequence
  oligonucleotide 13036
cctccaccaaccctactt

SEQ ID NO: 4335 - DNA, 22 bp, Artificial Sequence
  oligonucleotide 13039
ttatagaaggtgattgtgggtt

SEQ ID NO: 4336 - DNA, 22 bp, Artificial Sequence
  oligonucleotide 13040
atcctctaaaaacctccatttt

SEQ ID NO: 4337 - DNA, 22 bp, Artificial Sequence
  oligonucleotide 13047
ttaaggaatttgggtttaggta

SEQ ID NO: 4338 - DNA, 21 bp, Artificial Sequence
  oligonucleotide 13048
tattcaaaaactccctcctca

SEQ ID NO: 4339 - DNA, 24 bp, Artificial Sequence
  oligonucleotide 13079
aattagttggtgaaggtttttaat

SEQ ID NO: 4340 - DNA, 21 bp, Artificial Sequence
  oligonucleotide 13080
ccttactactaccccaatccc

SEQ ID NO: 4341 - DNA, 21 bp, Artificial Sequence
  oligonucleotide 13097
ttttagagtttttggtgtggg

SEQ ID NO: 4342 - DNA, 25 bp, Artificial Sequence
  oligonucleotide 13098
tcatccaactaaactacttcctact

SEQ ID NO: 4343 - DNA, 22 bp, Artificial Sequence
  oligonucleotide 13145
attagggtagttaaggggaaag

SEQ ID NO: 4344 - DNA, 22 bp, Artificial Sequence
  oligonucleotide 13146
atccacaaaaccttcataacat

SEQ ID NO: 4345 - DNA, 24 bp, Artificial Sequence
  oligonucleotide 13153
tttaattgggtataaataaatgga

SEQ ID NO: 4346 - DNA, 18 bp, Artificial Sequence
  oligonucleotide 13154
caccctaccccaaaaaca

SEQ ID NO: 4347 - DNA, 19 bp, Artificial Sequence
  oligonucleotide 13181
gtggggttggagttgtatt

SEQ ID NO: 4348 - DNA, 21 bp, Artificial Sequence
  oligonucleotide 13182
ccctctccctctttctaaatc

SEQ ID NO: 4349 - DNA, 22 bp, Artificial Sequence
  oligonucleotide 13191
tgtttagtttgggaagtgtttt

SEQ ID NO: 4350 - DNA, 22 bp, Artificial Sequence
  oligonucleotide 13192
ctttcctcctttattcctacaa

SEQ ID NO: 4351 - DNA, 19 bp, Artificial Sequence
  oligonucleotide 13367
gagttggggtagggagatg

SEQ ID NO: 4352 - DNA, 24 bp, Artificial Sequence
  oligonucleotide 13368
aactaaatatccaattcacaaaaa

SEQ ID NO: 4353 - DNA, 23 bp, Artificial Sequence
  oligonucleotide 13419
ttagaagaaggtttatttgatgg

SEQ ID NO: 4354 - DNA, 22 bp, Artificial Sequence
  oligonucleotide 13420
ataattccaaactcccctttac

SEQ ID NO: 4355 - DNA, 24 bp, Artificial Sequence
  oligonucleotide 13451
gaagtaagatgtttttagtggttg

SEQ ID NO: 4356 - DNA, 22 bp, Artificial Sequence
  oligonucleotide 13452
acctaaatctaacacccttcac

SEQ ID NO: 4357 - DNA, 23 bp, Artificial Sequence
  oligonucleotide 13453
agttgattttgatgtatggtttt

SEQ ID NO: 4358 - DNA, 19 bp, Artificial Sequence
  oligonucleotide 13454
ctcctccaccctcaacata

SEQ ID NO: 4359 - DNA, 23 bp, Artificial Sequence
  oligonucleotide 13459
tagtagtttttggaaggttatgg

SEQ ID NO: 4360 - DNA, 21 bp, Artificial Sequence
  oligonucleotide 13460
aatccctacctaactcaaccc

SEQ ID NO: 4361 - DNA, 23 bp, Artificial Sequence
  oligonucleotide 13465
tttggatttaggagtagagtttg

SEQ ID NO: 4362 - DNA, 22 bp, Artificial Sequence
  oligonucleotide 13466
aaatacttttccaacaaaaacc

SEQ ID NO: 4363 - DNA, 22 bp, Artificial Sequence
  oligonucleotide 17451
gaattggaaaagtatttgggta

SEQ ID NO: 4364 - DNA, 22 bp, Artificial Sequence
  oligonucleotide 17452
tcccatcttttatctcttcaaa

SEQ ID NO: 4365 - DNA, 20 bp, Artificial Sequence
  oligonucleotide 17481
attagtttttgggggaggtt

SEQ ID NO: 4366 - DNA, 23 bp, Artificial Sequence
  oligonucleotide 17482
aaaaccctaaactcctacctcta

SEQ ID NO: 4367 - DNA, 22 bp, Artificial Sequence
  oligonucleotide 17499
gggaagttttattttggtgtag

SEQ ID NO: 4368 - DNA, 20 bp, Artificial Sequence
  oligonucleotide 17500
cactcctcaaaaacccataa

SEQ ID NO: 4369 - DNA, 22 bp, Artificial Sequence
  oligonucleotide 17583
tgtaggaagtggagtattggta

SEQ ID NO: 4370 - DNA, 22 bp, Artificial Sequence
  oligonucleotide 17584
ccccaaaaatatcatctaaaaa

SEQ ID NO: 4371 - DNA, 21 bp, Artificial Sequence
  oligonucleotide 17615
ggaggtagagggagagttttt

SEQ ID NO: 4372 - DNA, 20 bp, Artificial Sequence
  oligonucleotide 17616
tccacttataccccctcaat

SEQ ID NO: 4373 - DNA, 22 bp, Artificial Sequence
  oligonucleotide 17649
tttagggtaaagaatttgggta

SEQ ID NO: 4374 - DNA, 23 bp, Artificial Sequence
  oligonucleotide 17650
aaaacctcaaactataatctccc

SEQ ID NO: 4375 - DNA, 22 bp, Artificial Sequence
  oligonucleotide 17777
ggttggatgttagttttaggag

SEQ ID NO: 4376 - DNA, 21 bp, Artificial Sequence
  oligonucleotide 17778
cattctcaccaatccctatct

SEQ ID NO: 4377 - DNA, 22 bp, Artificial Sequence
  oligonucleotide 17811
tagaggaggtttttggtattgt

SEQ ID NO: 4378 - DNA, 20 bp, Artificial Sequence
  oligonucleotide 17812
aactcccctttccttaaaaa

SEQ ID NO: 4379 - DNA, 22 bp, Artificial Sequence
  oligonucleotide 17971
ttagaaggaagaaggtagttgg

SEQ ID NO: 4380 - DNA, 23 bp, Artificial Sequence
  oligonucleotide 17972
ataaaaataaccctatccctacc

SEQ ID NO: 4381 - DNA, 23 bp, Artificial Sequence
  oligonucleotide 17973
agattgtttagggttgttgtaga

SEQ ID NO: 4382 - DNA, 20 bp, Artificial Sequence
  oligonucleotide 17974
tattcccaccaaacactacc

SEQ ID NO: 4383 - DNA, 22 bp, Artificial Sequence
  oligonucleotide 17997
tagtggtatagtgggatggttt

SEQ ID NO: 4384 - DNA, 25 bp, Artificial Sequence
  oligonucleotide 17998
tttctaaacacctcttctaaaattc

SEQ ID NO: 4385 - DNA, 25 bp, Artificial Sequence
  oligonucleotide 18023
aaaagtttaagataagtttgggtga

SEQ ID NO: 4386 - DNA, 22 bp, Artificial Sequence
  oligonucleotide 18024
cctaacatcaattacctcccta

SEQ ID NO: 4387 - DNA, 23 bp, Artificial Sequence
  oligonucleotide 18031
tgattgtggtattttatgaagaa

SEQ ID NO: 4388 - DNA, 22 bp, Artificial Sequence
  oligonucleotide 18032
acacctactatccaaccaaaaa

SEQ ID NO: 4389 - DNA, 22 bp, Artificial Sequence
  oligonucleotide 18035
ggaaatggagaattagtgtgat

SEQ ID NO: 4390 - DNA, 24 bp, Artificial Sequence
  oligonucleotide 18036
tctatctttcaatactacccaaaa

SEQ ID NO: 4391 - DNA, 23 bp, Artificial Sequence
  oligonucleotide 18065
ttgagtttgttagggttatgatt

SEQ ID NO: 4392 - DNA, 27 bp, Artificial Sequence
  oligonucleotide 18066
ccactttatcattaaatctctctttta

SEQ ID NO: 4393 - DNA, 27 bp, Artificial Sequence
  oligonucleotide 18077
gaatagaaggtagtttatttttgtttt

SEQ ID NO: 4394 - DNA, 23 bp, Artificial Sequence
  oligonucleotide 18078
catatcccatctcactatttacc

SEQ ID NO: 4395 - DNA, 20 bp, Artificial Sequence
  oligonucleotide 18085
ttggagttggtttggattta

SEQ ID NO: 4396 - DNA, 22 bp, Artificial Sequence
  oligonucleotide 18086
atcaaattaccctaaaaaccct

SEQ ID NO: 4397 - DNA, 22 bp, Artificial Sequence
  oligonucleotide 18109
atggtgttggtgtaggatattt

SEQ ID NO: 4398 - DNA, 22 bp, Artificial Sequence
  oligonucleotide 18110
ttacattttatcaccctccttc

SEQ ID NO: 4399 - DNA, 22 bp, Artificial Sequence
  oligonucleotide 18111
ttattgttttgttatggaggaa

SEQ ID NO: 4400 - DNA, 23 bp, Artificial Sequence
  oligonucleotide 18112
caaaaattcctacccttctttac

SEQ ID NO: 4401 - DNA, 24 bp, Artificial Sequence
  oligonucleotide 18127
gtgtgtttaagttttgtgataggg

SEQ ID NO: 4402 - DNA, 22 bp, Artificial Sequence
  oligonucleotide 18128
aaatataactcccccaaatacc

SEQ ID NO: 4403 - DNA, 22 bp, Artificial Sequence
  oligonucleotide 18153
gatatgatgtggttgaagttgt

SEQ ID NO: 4404 - DNA, 22 bp, Artificial Sequence
  oligonucleotide 18154
cattttcccctctaaaatctaa

SEQ ID NO: 4405 - DNA, 22 bp, Artificial Sequence
  oligonucleotide 18155
taattggtggtaatgagaaaaa

SEQ ID NO: 4406 - DNA, 26 bp, Artificial Sequence
  oligonucleotide 18156
aacaacaaaattaaactctcaatcta

SEQ ID NO: 4407 - DNA, 22 bp, Artificial Sequence
  oligonucleotide 18171
tttagagaaagtgtgggaaaat

SEQ ID NO: 4408 - DNA, 24 bp, Artificial Sequence
  oligonucleotide 18172
ttaacaactttaccaacctacaaa

SEQ ID NO: 4409 - DNA, 22 bp, Artificial Sequence
  oligonucleotide 18239
ttgagttgtgaagtgttgaaat

SEQ ID NO: 4410 - DNA, 22 bp, Artificial Sequence
  oligonucleotide 18240
catccatattcaatccaaatta

SEQ ID NO: 4411 - DNA, 21 bp, Artificial Sequence
  oligonucleotide 18329
tttttggtaggatagggtttt

SEQ ID NO: 4412 - DNA, 22 bp, Artificial Sequence
  oligonucleotide 18330
aacattccactatctcctcatc

SEQ ID NO: 4413 - DNA, 22 bp, Artificial Sequence
  oligonucleotide 18341
tgtttattatgattgagggaaa

SEQ ID NO: 4414 - DNA, 25 bp, Artificial Sequence
  oligonucleotide 18342
aaaaatactactcacctctaccaat

SEQ ID NO: 4415 - DNA, 21 bp, Artificial Sequence
  oligonucleotide 18349
ggaaaagggttgtttttgata

SEQ ID NO: 4416 - DNA, 21 bp, Artificial Sequence
  oligonucleotide 18350
ctaccccttcttaatccactc

SEQ ID NO: 4417 - DNA, 21 bp, Artificial Sequence
  oligonucleotide 18371
gaggggtgtagtattgaggtt

SEQ ID NO: 4418 - DNA, 22 bp, Artificial Sequence
  oligonucleotide 18372
cccacttcttaaactctcctaa

SEQ ID NO: 4419 - DNA, 22 bp, Artificial Sequence
  oligonucleotide 18423
tagttggagaggagatttgatg

SEQ ID NO: 4420 - DNA, 22 bp, Artificial Sequence
  oligonucleotide 18424
caacttcaaccttcaataacaa

SEQ ID NO: 4421 - DNA, 22 bp, Artificial Sequence
  oligonucleotide 18431
tttgtagtattgggttatgtgg

SEQ ID NO: 4422 - DNA, 22 bp, Artificial Sequence
  oligonucleotide 18432
ttcttactctccattcaaacaa

SEQ ID NO: 4423 - DNA, 20 bp, Artificial Sequence
  oligonucleotide 18459
agattggtattgggtttttg

SEQ ID NO: 4424 - DNA, 25 bp, Artificial Sequence
  oligonucleotide 18460
aaattcatcctaaatctttcactaa

SEQ ID NO: 4425 - DNA, 25 bp, Artificial Sequence
  oligonucleotide 18473
ttagtttttaagatggtatttgttg

SEQ ID NO: 4426 - DNA, 23 bp, Artificial Sequence
  oligonucleotide 18474
taaattatacccaatctccttcc

SEQ ID NO: 4427 - DNA, 22 bp, Artificial Sequence
  oligonucleotide 18485
ggagaaagaggaatttgtaagg

SEQ ID NO: 4428 - DNA, 23 bp, Artificial Sequence
  oligonucleotide 18486
aaatctacaatcacaattaaccc

SEQ ID NO: 4429 - DNA, 23 bp, Artificial Sequence
  oligonucleotide 18489
tggggattatttaggtatgtagg

SEQ ID NO: 4430 - DNA, 18 bp, Artificial Sequence
  oligonucleotide 18490
tcccatctccctctcaaa

SEQ ID NO: 4431 - DNA, 24 bp, Artificial Sequence
  oligonucleotide 18567
ggtaaagttgagattttagatggt

SEQ ID NO: 4432 - DNA, 25 bp, Artificial Sequence
  oligonucleotide 18568
tctaccctaataataaaaaccacac

SEQ ID NO: 4433 - DNA, 22 bp, Artificial Sequence
  oligonucleotide 18583
ggagtaattttgatttggagag

SEQ ID NO: 4434 - DNA, 24 bp, Artificial Sequence
  oligonucleotide 18584
aaacctaactaaaaacccatattt

SEQ ID NO: 4435 - DNA, 25 bp, Artificial Sequence
  oligonucleotide 18621
aattttgtaataggagagtttttga

SEQ ID NO: 4436 - DNA, 18 bp, Artificial Sequence
  oligonucleotide 18622
ccaccatacaacacccaa

SEQ ID NO: 4437 - DNA, 21 bp, Artificial Sequence
  oligonucleotide 18687
gaggaaaaagtttgagtggtt

SEQ ID NO: 4438 - DNA, 27 bp, Artificial Sequence
  oligonucleotide 18688
tacaaaacactactataaatctcccat

SEQ ID NO: 4439 - DNA, 21 bp, Artificial Sequence
  oligonucleotide 18691
tgtttttgtgtgattgagatg

SEQ ID NO: 4440 - DNA, 23 bp, Artificial Sequence
  oligonucleotide 18692
ttttactctttacaaccctcaac

SEQ ID NO: 4441 - DNA, 22 bp, Artificial Sequence
  oligonucleotide 18725
aaggttaggataaaggagagga

SEQ ID NO: 4442 - DNA, 21 bp, Artificial Sequence
  oligonucleotide 18726
ctaacaccctaatttccaacc

SEQ ID NO: 4443 - DNA, 22 bp, Artificial Sequence
  oligonucleotide 18743
gttaggagaaggggaagtagat

SEQ ID NO: 4444 - DNA, 22 bp, Artificial Sequence
  oligonucleotide 18744
tctaaaccaacccttttacaat

SEQ ID NO: 4445 - DNA, 25 bp, Artificial Sequence
  oligonucleotide 18795
tgtgagaaagagagttatagtttga

SEQ ID NO: 4446 - DNA, 22 bp, Artificial Sequence
  oligonucleotide 18796
taacttaccaacaattacccaa

SEQ ID NO: 4447 - DNA, 22 bp, Artificial Sequence
  oligonucleotide 18799
ttattgtggggaggtaatgtag

SEQ ID NO: 4448 - DNA, 23 bp, Artificial Sequence
  oligonucleotide 18800
tccttcctctctctataaccata

SEQ ID NO: 4449 - DNA, 26 bp, Artificial Sequence
  oligonucleotide 18815
tgattagtaaaatatggaaatagagg

SEQ ID NO: 4450 - DNA, 26 bp, Artificial Sequence
  oligonucleotide 18816
tcattatctaaaaccaactacctaac

SEQ ID NO: 4451 - DNA, 24 bp, Artificial Sequence
  oligonucleotide 18835
ttagaatgttggaggaaatagttg

SEQ ID NO: 4452 - DNA, 25 bp, Artificial Sequence
  oligonucleotide 18836
aattcttaaacctcactacaaactc

SEQ ID NO: 4453 - DNA, 19 bp, Artificial Sequence
  oligonucleotide 19085
ttagaagttgggggaagtg

SEQ ID NO: 4454 - DNA, 25 bp, Artificial Sequence
  oligonucleotide 19086
cctatctaatatccttaacaaccaa

SEQ ID NO: 4455 - DNA, 21 bp, Artificial Sequence
  oligonucleotide 19249
tttatttgagattgggtttga

SEQ ID NO: 4456 - DNA, 23 bp, Artificial Sequence
  oligonucleotide 19250
aaatacccctacaacactaaaaa

SEQ ID NO: 4457 - DNA, 22 bp, Artificial Sequence
  oligonucleotide 19269
ttgtagaaattgataggtgtgg

SEQ ID NO: 4458 - DNA, 24 bp, Artificial Sequence
  oligonucleotide 19270
aaataactctactaaccccaaaaa

SEQ ID NO: 4459 - DNA, 23 bp, Artificial Sequence
  oligonucleotide 19313
gagtttggttggttttagaagta

SEQ ID NO: 4460 - DNA, 22 bp, Artificial Sequence
  oligonucleotide 19314
ctacacaataaacataaccccc

SEQ ID NO: 4461 - DNA, 24 bp, Artificial Sequence
  oligonucleotide 19331
tttttataggatatgagggttgat

SEQ ID NO: 4462 - DNA, 23 bp, Artificial Sequence
  oligonucleotide 19332
ccttaaacccaaactctactacc

SEQ ID NO: 4463 - DNA, 20 bp, Artificial Sequence
  oligonucleotide 19333
gggaggaggtgttttgtatt

SEQ ID NO: 4464 - DNA, 21 bp, Artificial Sequence
  oligonucleotide 19334
aactcccactacccctactaa

SEQ ID NO: 4465 - DNA, 24 bp, Artificial Sequence
  oligonucleotide 19337
taggtaatttttgtttatggtgtt

SEQ ID NO: 4466 - DNA, 22 bp, Artificial Sequence
  oligonucleotide 19338
ctcctcttcatcctacacatct

SEQ ID NO: 4467 - DNA, 21 bp, Artificial Sequence
  oligonucleotide 19381
tttttgttttggatgaggtaa

SEQ ID NO: 4468 - DNA, 22 bp, Artificial Sequence
  oligonucleotide 19382
caaaatccttctcaacactaca

SEQ ID NO: 4469 - DNA, 22 bp, Artificial Sequence
  oligonucleotide 19395
taatagatgatttgtggaaggg

SEQ ID NO: 4470 - DNA, 25 bp, Artificial Sequence
  oligonucleotide 19396
tttttacaatactcccaaaacttac

SEQ ID NO: 4471 - DNA, 22 bp, Artificial Sequence
  oligonucleotide 19435
tgagaaggtgtggtattaggat

SEQ ID NO: 4472 - DNA, 24 bp, Artificial Sequence
  oligonucleotide 19436
ctcttcccttaaaaataaaatcaa

SEQ ID NO: 4473 - DNA, 18 bp, Artificial Sequence
  oligonucleotide 19447
ttaaggtttggttggggt

SEQ ID NO: 4474 - DNA, 26 bp, Artificial Sequence
  oligonucleotide 19448
tttaactcctaaatacatcttcccta

SEQ ID NO: 4475 - DNA, 23 bp, Artificial Sequence
  oligonucleotide 19479
gggggtagtagattgtttagttt

SEQ ID NO: 4476 - DNA, 26 bp, Artificial Sequence
  oligonucleotide 19480
acctaaataccaaaatctctttacaa

SEQ ID NO: 4477 - DNA, 22 bp, Artificial Sequence
  oligonucleotide 19513
ggtggtatagtggtgaattttg

SEQ ID NO: 4478 - DNA, 19 bp, Artificial Sequence
  oligonucleotide 19514
ctcttcctccaaaccccta

SEQ ID NO: 4479 - DNA, 20 bp, Artificial Sequence
  oligonucleotide 22051
ggtaaggatttgatggagaa

SEQ ID NO: 4480 - DNA, 21 bp, Artificial Sequence
  oligonucleotide 22052
tcctaaaccctacaatccaaa

SEQ ID NO: 4481 - DNA, 19 bp, Artificial Sequence
  oligonucleotide 22055
agggatggagatttggttt

SEQ ID NO: 4482 - DNA, 19 bp, Artificial Sequence
  oligonucleotide 22056
actcccttcccctttaatc

SEQ ID NO: 4483 - DNA, 26 bp, Artificial Sequence
  oligonucleotide 22061
aaagtttagatatttgtgggttgtat

SEQ ID NO: 4484 - DNA, 21 bp, Artificial Sequence
  oligonucleotide 22062
cctaaaaatcccaatctcttc

SEQ ID NO: 4485 - DNA, 24 bp, Artificial Sequence
  oligonucleotide 22067
ttaggtgtttagagtagggagttt

SEQ ID NO: 4486 - DNA, 25 bp, Artificial Sequence
  oligonucleotide 22068
accaatctttctcttatacaatttc

SEQ ID NO: 4487 - DNA, 25 bp, Artificial Sequence
  oligonucleotide 22075
gggttatttatgagatattgttagg

SEQ ID NO: 4488 - DNA, 19 bp, Artificial Sequence
  oligonucleotide 22076
cccctattcaaacccttta

SEQ ID NO: 4489 - DNA, 21 bp, Artificial Sequence
  oligonucleotide 22087
gggttgatggaagattgtaga

SEQ ID NO: 4490 - DNA, 25 bp, Artificial Sequence
  oligonucleotide 22088
caatcaaataaaccataactaaaaa

SEQ ID NO: 4491 - DNA, 23 bp, Artificial Sequence
  oligonucleotide 22099
gaaggggtaaaataagttaggga

SEQ ID NO: 4492 - DNA, 22 bp, Artificial Sequence
  oligonucleotide 22100
cctacctccctctaaactcaaa

SEQ ID NO: 4493 - DNA, 25 bp, Artificial Sequence
  oligonucleotide 22131
ttatttgtattgttggtagatgatt

SEQ ID NO: 4494 - DNA, 22 bp, Artificial Sequence
  oligonucleotide 22132
atcataaaacctaacccctttt

SEQ ID NO: 4495 - DNA, 20 bp, Artificial Sequence
  oligonucleotide 22137
ggatggttttggagattttt

SEQ ID NO: 4496 - DNA, 19 bp, Artificial Sequence
  oligonucleotide 22138
cctcaattaaccctttccc

SEQ ID NO: 4497 - DNA, 25 bp, Artificial Sequence
  oligonucleotide 22141
ggaaataaaaatgtgagtatgaagt

SEQ ID NO: 4498 - DNA, 21 bp, Artificial Sequence
  oligonucleotide 22142
tatatcctccacctacaaccc

SEQ ID NO: 4499 - DNA, 23 bp, Artificial Sequence
  oligonucleotide 22163
ttataggagaaaatggtttgttt

SEQ ID NO: 4500 - DNA, 18 bp, Artificial Sequence
  oligonucleotide 22164
cttccttcaaccctaccc

SEQ ID NO: 4501 - DNA, 21 bp, Artificial Sequence
  oligonucleotide 22171
gggtatgagtaagaatttggg

SEQ ID NO: 4502 - DNA, 18 bp, Artificial Sequence
  oligonucleotide 22172
cctcccttccatcaaaaa

SEQ ID NO: 4503 - DNA, 25 bp, Artificial Sequence
  oligonucleotide 22173
aagagagtaggtagttggtgtaaga

SEQ ID NO: 4504 - DNA, 21 bp, Artificial Sequence
  oligonucleotide 22174
actccttaaaaccccaaaata

SEQ ID NO: 4505 - DNA, 18 bp, Artificial Sequence
  oligonucleotide 22183
agtgaatggaggggttgt

SEQ ID NO: 4506 - DNA, 25 bp, Artificial Sequence
  oligonucleotide 22184
cctctttcctcttatacaaattacc

SEQ ID NO: 4507 - DNA, 27 bp, Artificial Sequence
  oligonucleotide 22201
tgtaggtaagaagttgtttattattga

SEQ ID NO: 4508 - DNA, 24 bp, Artificial Sequence
  oligonucleotide 22202
tctatcaacccatataaaataccc

SEQ ID NO: 4509 - DNA, 20 bp, Artificial Sequence
  oligonucleotide 22223
tttggaagtagtaggggagg

SEQ ID NO: 4510 - DNA, 25 bp, Artificial Sequence
  oligonucleotide 22224
aaacctataccctaaattctcatta

SEQ ID NO: 4511 - DNA, 20 bp, Artificial Sequence
  oligonucleotide 22233
agagaggagtttatttgggg

SEQ ID NO: 4512 - DNA, 25 bp, Artificial Sequence
  oligonucleotide 22234
tcatccacctactaaaaattctaaa

SEQ ID NO: 4513 - DNA, 18 bp, Artificial Sequence
  oligonucleotide 22269
ggaaagggggaagttttt

SEQ ID NO: 4514 - DNA, 23 bp, Artificial Sequence
  oligonucleotide 22270
aaaataaatcctaacatctccaa

SEQ ID NO: 4515 - DNA, 24 bp, Artificial Sequence
  oligonucleotide 22299
aggttatgtttgtgttttgtgtaa

SEQ ID NO: 4516 - DNA, 26 bp, Artificial Sequence
  oligonucleotide 22300
attaaactactcaaccaattttctaa

SEQ ID NO: 4517 - DNA, 20 bp, Artificial Sequence
  oligonucleotide 22379
agttgaggggtggttagttt

SEQ ID NO: 4518 - DNA, 21 bp, Artificial Sequence
  oligonucleotide 22380
tctaactttcccaccaaaatc

SEQ ID NO: 4519 - DNA, 19 bp, Artificial Sequence
  oligonucleotide 22383
tgattggttgtgtgaatgg

SEQ ID NO: 4520 - DNA, 21 bp, Artificial Sequence
  oligonucleotide 22384
aactacccctaaatcccaaaa

SEQ ID NO: 4521 - DNA, 18 bp, Artificial Sequence
  oligonucleotide 22399
agtggtagaggtgggagg

SEQ ID NO: 4522 - DNA, 25 bp, Artificial Sequence
  oligonucleotide 22400
accctaataacaatcaacaactaaa

SEQ ID NO: 4523 - DNA, 25 bp, Artificial Sequence
  oligonucleotide 22401
gaaaatatgagtttagaagggtttt

SEQ ID NO: 4524 - DNA, 18 bp, Artificial Sequence
  oligonucleotide 22402
cttcctccacccaacata

SEQ ID NO: 4525 - DNA, 22 bp, Artificial Sequence
  oligonucleotide 22409
gttaagagggtttttagaatgg

SEQ ID NO: 4526 - DNA, 21 bp, Artificial Sequence
  oligonucleotide 22410
cctacatctctttccccaata

SEQ ID NO: 4527 - DNA, 23 bp, Artificial Sequence
  oligonucleotide 22499
tgttttatttaatttgaggggta

SEQ ID NO: 4528 - DNA, 18 bp, Artificial Sequence
  oligonucleotide 22500
ccacccttaacaaccacc

SEQ ID NO: 4529 - DNA, 19 bp, Artificial Sequence
  oligonucleotide 22521
ggaggaggggatttttatt

SEQ ID NO: 4530 - DNA, 21 bp, Artificial Sequence
  oligonucleotide 22522
tacaacttctcccataccaaa

SEQ ID NO: 4531 - DNA, 19 bp, Artificial Sequence
  oligonucleotide 22537
attgaagtttgggtggaat

SEQ ID NO: 4532 - DNA, 22 bp, Artificial Sequence
  oligonucleotide 22538
ccacaaaacaataccatttaca

SEQ ID NO: 4533 - DNA, 22 bp, Artificial Sequence
  oligonucleotide 22539
aattatagagattgtgagggga

SEQ ID NO: 4534 - DNA, 19 bp, Artificial Sequence
  oligonucleotide 22540
tccctacccccaaataaaa

SEQ ID NO: 4535 - DNA, 20 bp, Artificial Sequence
  oligonucleotide 22569
gtataatgggatgaaggggt

SEQ ID NO: 4536 - DNA, 26 bp, Artificial Sequence
  oligonucleotide 22570
ttcacatataaacttaaaacaaatcc

SEQ ID NO: 4537 - DNA, 22 bp, Artificial Sequence
  oligonucleotide 22607
ggtgtgtaagaagatagggaaa

SEQ ID NO: 4538 - DNA, 25 bp, Artificial Sequence
  oligonucleotide 22608
aaaaattcctcattactaaaaacaa

SEQ ID NO: 4539 - DNA, 21 bp, Artificial Sequence
  oligonucleotide 22611
tattgggatgagagtttggtt

SEQ ID NO: 4540 - DNA, 18 bp, Artificial Sequence
  oligonucleotide 22612
cttcacccccaacacatt

SEQ ID NO: 4541 - DNA, 21 bp, Artificial Sequence
  oligonucleotide 22621
gagggttaaggttaggttgtt

SEQ ID NO: 4542 - DNA, 21 bp, Artificial Sequence
  oligonucleotide 22622
ccttctactctcatcccaaaa

SEQ ID NO: 4543 - DNA, 26 bp, Artificial Sequence
  oligonucleotide 22623
ggtagtgtggatatgagttaagtttt

SEQ ID NO: 4544 - DNA, 22 bp, Artificial Sequence
  oligonucleotide 22624
tctaaccaccaactctaaacaa

SEQ ID NO: 4545 - DNA, 21 bp, Artificial Sequence
  oligonucleotide 22671
tggggtgagtgaggtattatt

SEQ ID NO: 4546 - DNA, 22 bp, Artificial Sequence
  oligonucleotide 22672
ccaaaatcactatccttctcct

SEQ ID NO: 4547 - DNA, 21 bp, Artificial Sequence
  oligonucleotide 22693
gtaaatgttgttttagggggt

SEQ ID NO: 4548 - DNA, 21 bp, Artificial Sequence
  oligonucleotide 22694
aaacttccatcatcttccaaa

SEQ ID NO: 4549 - DNA, 18 bp, Artificial Sequence
  oligonucleotide 22705
ttaaagggggagaaatgg

SEQ ID NO: 4550 - DNA, 21 bp, Artificial Sequence
  oligonucleotide 22706
aacttatcaaaacccccataa

SEQ ID NO: 4551 - DNA, 20 bp, Artificial Sequence
  oligonucleotide 22707
ggaggtgggtgaataagttt

SEQ ID NO: 4552 - DNA, 25 bp, Artificial Sequence
  oligonucleotide 22708
accaatttcttcctaatactacatc

SEQ ID NO: 4553 - DNA, 21 bp, Artificial Sequence
  oligonucleotide 22729
aatgttgaagttggggatatt

SEQ ID NO: 4554 - DNA, 21 bp, Artificial Sequence
  oligonucleotide 22730
ccatacaaacctttccctaaa

SEQ ID NO: 4555 - DNA, 23 bp, Artificial Sequence
  oligonucleotide 22741
tgaaagggaggtatagttaatga

SEQ ID NO: 4556 - DNA, 21 bp, Artificial Sequence
  oligonucleotide 22742
cccaaaacaaacaaaataaaa

SEQ ID NO: 4557 - DNA, 25 bp, Artificial Sequence
  oligonucleotide 22747
ggagaaatgagaaggaatatagtaa

SEQ ID NO: 4558 - DNA, 18 bp, Artificial Sequence
  oligonucleotide 22748
actcccctaaacccaaaa

SEQ ID NO: 4559 - DNA, 18 bp, Artificial Sequence
  oligonucleotide 22791
gagttaagggatgagggg

SEQ ID NO: 4560 - DNA, 21 bp, Artificial Sequence
  oligonucleotide 22792
caatcctaccaaactttccaa

SEQ ID NO: 4561 - DNA, 21 bp, Artificial Sequence
  oligonucleotide 22795
ggggtagttaagtggaattga

SEQ ID NO: 4562 - DNA, 24 bp, Artificial Sequence
  oligonucleotide 22796
ctcaaccctaaaaacaataacaaa

SEQ ID NO: 4563 - DNA, 20 bp, Artificial Sequence
  oligonucleotide 22843
tgtggagatgtttaaggtgg

SEQ ID NO: 4564 - DNA, 19 bp, Artificial Sequence
  oligonucleotide 22844
tttctcccacccctactaa

SEQ ID NO: 4565 - DNA, 23 bp, Artificial Sequence
  oligonucleotide 22867
tagtgttagttgaggaggttttt

SEQ ID NO: 4566 - DNA, 23 bp, Artificial Sequence
  oligonucleotide 22868
aatcataccctaattctactccc

SEQ ID NO: 4567 - DNA, 19 bp, Artificial Sequence
  oligonucleotide 22893
ggggaagaggtatttggat

SEQ ID NO: 4568 - DNA, 25 bp, Artificial Sequence
  oligonucleotide 22894
aacctcctttactactccatctcta

SEQ ID NO: 4569 - DNA, 22 bp, Artificial Sequence
  oligonucleotide 22917
ggagtgtggagagtaaagagtt

SEQ ID NO: 4570 - DNA, 21 bp, Artificial Sequence
  oligonucleotide 22918
atttcctaaataaccaatccc

SEQ ID NO: 4571 - DNA, 18 bp, Artificial Sequence
  oligonucleotide 22965
tgtttttgaggagggaaa

SEQ ID NO: 4572 - DNA, 24 bp, Artificial Sequence
  oligonucleotide 22966
atctacacccaaacaaaactataa

SEQ ID NO: 4573 - DNA, 24 bp, Artificial Sequence
  oligonucleotide 23009
aatagttttgtttttatgggtttg

SEQ ID NO: 4574 - DNA, 21 bp, Artificial Sequence
  oligonucleotide 23010
tcccctcaactacatcttcta

SEQ ID NO: 4575 - DNA, 18 bp, Artificial Sequence
  oligonucleotide 23031
gtaaaggtttggtggggt

SEQ ID NO: 4576 - DNA, 25 bp, Artificial Sequence
  oligonucleotide 23032
aatcctacctattaacatttcctaa

SEQ ID NO: 4577 - DNA, 21 bp, Artificial Sequence
  oligonucleotide 23051
gattgttttgggtttgtgttt

SEQ ID NO: 4578 - DNA, 23 bp, Artificial Sequence
  oligonucleotide 23052
acaactttaataccatctttcca

SEQ ID NO: 4579 - DNA, 22 bp, Artificial Sequence
  oligonucleotide 23059
ggagatagtgaagttgtttgtg

SEQ ID NO: 4580 - DNA, 19 bp, Artificial Sequence
  oligonucleotide 23060
actcctctcccatccctaa

SEQ ID NO: 4581 - DNA, 22 bp, Artificial Sequence
  oligonucleotide 23061
gaaaagaagattttgagtggtt

SEQ ID NO: 4582 - DNA, 22 bp, Artificial Sequence
  oligonucleotide 23062
aacatttatcactacctacccc

SEQ ID NO: 4583 - DNA, 25 bp, Artificial Sequence
  oligonucleotide 23065
ttgtattagaaggaattagtggttt

SEQ ID NO: 4584 - DNA, 19 bp, Artificial Sequence
  oligonucleotide 23066
tcctacaaaattcacccct

SEQ ID NO: 4585 - DNA, 21 bp, Artificial Sequence
  oligonucleotide 23155
tttttagttttggattgggtt

SEQ ID NO: 4586 - DNA, 24 bp, Artificial Sequence
  oligonucleotide 23156
acttcactaccctaacatttacaa

SEQ ID NO: 4587 - DNA, 23 bp, Artificial Sequence
  oligonucleotide 23279
tttttgagagtggttttgtagtt

SEQ ID NO: 4588 - DNA, 22 bp, Artificial Sequence
  oligonucleotide 23280
caaattctttaacaaccctttt

SEQ ID NO: 4589 - DNA, 27 bp, Artificial Sequence
  oligonucleotide 23287
gagtaatgggtttagtttttgttattt

SEQ ID NO: 4590 - DNA, 22 bp, Artificial Sequence
  oligonucleotide 23288
caatctaatctcccacctctac

SEQ ID NO: 4591 - DNA, 21 bp, Artificial Sequence
  oligonucleotide 23291
atgttggggaaattagaaagt

SEQ ID NO: 4592 - DNA, 18 bp, Artificial Sequence
  oligonucleotide 23292
ctcccttcctcaccctaa

SEQ ID NO: 4593 - DNA, 21 bp, Artificial Sequence
  oligonucleotide 23351
ggtatatttaggggagggtgt

SEQ ID NO: 4594 - DNA, 24 bp, Artificial Sequence
  oligonucleotide 23352
tttaacaaacctaattctcaaaac

SEQ ID NO: 4595 - DNA, 19 bp, Artificial Sequence
  oligonucleotide 23353
ggagaaaattggggttgtt

SEQ ID NO: 4596 - DNA, 18 bp, Artificial Sequence
  oligonucleotide 23354
ccaaacccttaaacccac

SEQ ID NO: 4597 - DNA, 26 bp, Artificial Sequence
  oligonucleotide 23363
gtagagtgaatagttttagaaatgga

SEQ ID NO: 4598 - DNA, 24 bp, Artificial Sequence
  oligonucleotide 23364
aacatatcaccatcttaactcaaa

SEQ ID NO: 4599 - DNA, 22 bp, Artificial Sequence
  oligonucleotide 23391
ggaggaaggttatgttaaatgg

SEQ ID NO: 4600 - DNA, 22 bp, Artificial Sequence
  oligonucleotide 23392
ctaaatccccaaatacttcaaa

SEQ ID NO: 4601 - DNA, 27 bp, Artificial Sequence
  oligonucleotide 23409
agatagttttggagttaaagttagaat

SEQ ID NO: 4602 - DNA, 21 bp, Artificial Sequence
  oligonucleotide 23410
aaaaatcaccctcttaaccat

SEQ ID NO: 4603 - DNA, 22 bp, Artificial Sequence
  oligonucleotide 23411
ttgagaaggtaatgggagagtt

SEQ ID NO: 4604 - DNA, 18 bp, Artificial Sequence
  oligonucleotide 23412
aaaaatccaaccccaaaa

SEQ ID NO: 4605 - DNA, 26 bp, Artificial Sequence
  oligonucleotide 23417
tttaagagtatggattgttttgtatt

SEQ ID NO: 4606 - DNA, 21 bp, Artificial Sequence
  oligonucleotide 23418
atcttcctcaaaaattaaccc

SEQ ID NO: 4607 - DNA, 23 bp, Artificial Sequence
  oligonucleotide 23421
ttggtaattttaggagtatggaa

SEQ ID NO: 4608 - DNA, 21 bp, Artificial Sequence
  oligonucleotide 23422
ccccaaaacaaaactcatcta

SEQ ID NO: 4609 - DNA, 18 bp, Artificial Sequence
  oligonucleotide 23437
tggaattggggtggtagt

SEQ ID NO: 4610 - DNA, 23 bp, Artificial Sequence
  oligonucleotide 23438
ccaaacaaatcacaacaaaataa

SEQ ID NO: 4611 - DNA, 20 bp, Artificial Sequence
  oligonucleotide 23441
attggaaagggagttaggtt

SEQ ID NO: 4612 - DNA, 22 bp, Artificial Sequence
  oligonucleotide 23442
catctaatttcaaacccaaaaa

SEQ ID NO: 4613 - DNA, 22 bp, Artificial Sequence
  oligonucleotide 23451
taggggttgtagaagaagagag

SEQ ID NO: 4614 - DNA, 23 bp, Artificial Sequence
  oligonucleotide 23452
tccctcctatcacataaataaaa

SEQ ID NO: 4615 - DNA, 25 bp, Artificial Sequence
  oligonucleotide 23455
tgatgggaatataataggttgtaga

SEQ ID NO: 4616 - DNA, 24 bp, Artificial Sequence
  oligonucleotide 23456
tataatttcaaacccaaaactcaa

SEQ ID NO: 4617 - DNA, 23 bp, Artificial Sequence
  oligonucleotide 23491
tatggaatttagttttgtttggt

SEQ ID NO: 4618 - DNA, 23 bp, Artificial Sequence
  oligonucleotide 23492
ataactttcaactccttcaaaaa

SEQ ID NO: 4619 - DNA, 22 bp, Artificial Sequence
  oligonucleotide 23495
gataagtgaaaaaggaaggaag

SEQ ID NO: 4620 - DNA, 23 bp, Artificial Sequence
  oligonucleotide 23496
taattccacatctcaacaaataa

SEQ ID NO: 4621 - DNA, 21 bp, Artificial Sequence
  oligonucleotide 23497
agaaatgagtggggtattttg

SEQ ID NO: 4622 - DNA, 18 bp, Artificial Sequence
  oligonucleotide 23498
aactccctcaccccctaa

SEQ ID NO: 4623 - DNA, 20 bp, Artificial Sequence
  oligonucleotide 23519
ggaagaggatgggagttatt

SEQ ID NO: 4624 - DNA, 24 bp, Artificial Sequence
  oligonucleotide 23520
caaccaccttaatacaaatctttc

SEQ ID NO: 4625 - DNA, 22 bp, Artificial Sequence
  oligonucleotide 23537
tggggtaatttataggagagtg

SEQ ID NO: 4626 - DNA, 22 bp, Artificial Sequence
  oligonucleotide 23538
cccttcttctcccttatctcta

SEQ ID NO: 4627 - DNA, 19 bp, Artificial Sequence
  oligonucleotide 23539
ttggtagtggggaagagtg

SEQ ID NO: 4628 - DNA, 21 bp, Artificial Sequence
  oligonucleotide 23540
cccccaaatctaaaataaaaa

SEQ ID NO: 4629 - DNA, 19 bp, Artificial Sequence
  oligonucleotide 23541
ggggaaggaaagagtgtta

SEQ ID NO: 4630 - DNA, 27 bp, Artificial Sequence
  oligonucleotide 23542
aactaacttaatatcccttatcaaaaa

SEQ ID NO: 4631 - DNA, 24 bp, Artificial Sequence
  oligonucleotide 23559
agaagttggtattgttttgttgtt

SEQ ID NO: 4632 - DNA, 24 bp, Artificial Sequence
  oligonucleotide 23560
ttacttcctactataaatccctcc

SEQ ID NO: 4633 - DNA, 20 bp, Artificial Sequence
  oligonucleotide 23573
gggatttgagaaagttttgg

SEQ ID NO: 4634 - DNA, 22 bp, Artificial Sequence
  oligonucleotide 23574
aacaattaccctcctctcacta

SEQ ID NO: 4635 - DNA, 18 bp, Artificial Sequence
  oligonucleotide 23605
gggttttgggtgaatgaa

SEQ ID NO: 4636 - DNA, 25 bp, Artificial Sequence
  oligonucleotide 23606
aaacttacaccctcttcttatttta

SEQ ID NO: 4637 - DNA, 23 bp, Artificial Sequence
  oligonucleotide 23631
gggtggaggtatttttatagatt

SEQ ID NO: 4638 - DNA, 18 bp, Artificial Sequence
  oligonucleotide 23632
ccttccaaccaaacatca

SEQ ID NO: 4639 - DNA, 25 bp, Artificial Sequence
  oligonucleotide 23639
gttggtatgaattatgaagttgttt

SEQ ID NO: 4640 - DNA, 19 bp, Artificial Sequence
  oligonucleotide 23640
ccaaaaccttcctccctac

SEQ ID NO: 4641 - DNA, 20 bp, Artificial Sequence
  oligonucleotide 23645
gggtaggtgttatttttggg

SEQ ID NO: 4642 - DNA, 21 bp, Artificial Sequence
  oligonucleotide 23646
catttccatccatatctctca

SEQ ID NO: 4643 - DNA, 22 bp, Artificial Sequence
  oligonucleotide 23651
tttgatttgttttagtgggatt

SEQ ID NO: 4644 - DNA, 22 bp, Artificial Sequence
  oligonucleotide 23652
ccctcttctaacttacaccaac

SEQ ID NO: 4645 - DNA, 21 bp, Artificial Sequence
  oligonucleotide 23693
gggatttgttataggagatgg

SEQ ID NO: 4646 - DNA, 22 bp, Artificial Sequence
  oligonucleotide 23694
ctctccccactaaacttctaaa

SEQ ID NO: 4647 - DNA, 25 bp, Artificial Sequence
  oligonucleotide 23695
tggtgaagtttagtagttagtggtt

SEQ ID NO: 4648 - DNA, 18 bp, Artificial Sequence
  oligonucleotide 23696
aaacctccctctatccca

SEQ ID NO: 4649 - DNA, 19 bp, Artificial Sequence
  oligonucleotide 23725
aaatgttgggaggttgttt

SEQ ID NO: 4650 - DNA, 20 bp, Artificial Sequence
  oligonucleotide 23726
acctatcccctttccaacta

SEQ ID NO: 4651 - DNA, 21 bp, Artificial Sequence
  oligonucleotide 23735
taggtttttgggtagggtttt

SEQ ID NO: 4652 - DNA, 23 bp, Artificial Sequence
  oligonucleotide 23736
cccactacacttcacctatatca

SEQ ID NO: 4653 - DNA, 19 bp, Artificial Sequence
  oligonucleotide 23739
aagggagaattgatgttgg

SEQ ID NO: 4654 - DNA, 21 bp, Artificial Sequence
  oligonucleotide 23740
ccatatccttcctacacccta

SEQ ID NO: 4655 - DNA, 20 bp, Artificial Sequence
  oligonucleotide 23751
tatatttgggggttaagtgg

SEQ ID NO: 4656 - DNA, 25 bp, Artificial Sequence
  oligonucleotide 23752
atacaaaaactaacaccaacaacaa

SEQ ID NO: 4657 - DNA, 26 bp, Artificial Sequence
  oligonucleotide 23757
ggtaaaagtagagagaatagaaggat

SEQ ID NO: 4658 - DNA, 23 bp, Artificial Sequence
  oligonucleotide 23758
caaacttcaaacccttactaaaa

SEQ ID NO: 4659 - DNA, 21 bp, Artificial Sequence
  oligonucleotide 23761
tagtgggaaagagggaatttt

SEQ ID NO: 4660 - DNA, 19 bp, Artificial Sequence
  oligonucleotide 23762
ccctaacccttaaccacaa

SEQ ID NO: 4661 - DNA, 18 bp, Artificial Sequence
  oligonucleotide 23763
tttgggtgatggatgtgt

SEQ ID NO: 4662 - DNA, 26 bp, Artificial Sequence
  oligonucleotide 23764
caataaacaaacctactaccttattc

SEQ ID NO: 4663 - DNA, 22 bp, Artificial Sequence
  oligonucleotide 23773
gggggatattagagtgtatgaa

SEQ ID NO: 4664 - DNA, 18 bp, Artificial Sequence
  oligonucleotide 23774
aacaaccccaaacatcaa

SEQ ID NO: 4665 - DNA, 27 bp, Artificial Sequence
  oligonucleotide 23777
tataaaagtaagaaaagttagtgtggg

SEQ ID NO: 4666 - DNA, 23 bp, Artificial Sequence
  oligonucleotide 23778
aacaacccaatcacaaataataa

SEQ ID NO: 4667 - DNA, 24 bp, Artificial Sequence
  oligonucleotide 23795
gaattagttgtagttgggattttt

SEQ ID NO: 4668 - DNA, 18 bp, Artificial Sequence
  oligonucleotide 23796
caaacacctctccccata

SEQ ID NO: 4669 - DNA, 20 bp, Artificial Sequence
  oligonucleotide 23807
ttggtttggttttgtttgtt

SEQ ID NO: 4670 - DNA, 25 bp, Artificial Sequence
  oligonucleotide 23808
acccaactctataaaaactctacac

SEQ ID NO: 4671 - DNA, 22 bp, Artificial Sequence
  oligonucleotide 27241
ggttaataaagtttggttggtt

SEQ ID NO: 4672 - DNA, 18 bp, Artificial Sequence
  oligonucleotide 27242
ccctaaaaccacctcctc

SEQ ID NO: 4673 - DNA, 18 bp, Artificial Sequence
  oligonucleotide 27295
ggaaggttggatagggaa

SEQ ID NO: 4674 - DNA, 26 bp, Artificial Sequence
  oligonucleotide 27296
aaatacctcctctaaacctaaactaa

SEQ ID NO: 4675 - DNA, 25 bp, Artificial Sequence
  oligonucleotide 27299
gtagtagagagttgttgaattttga

SEQ ID NO: 4676 - DNA, 22 bp, Artificial Sequence
  oligonucleotide 27300
tctccacccactacctaaacta

SEQ ID NO: 4677 - DNA, 23 bp, Artificial Sequence
  oligonucleotide 27303
tgtagtttgaggaattttgattt

SEQ ID NO: 4678 - DNA, 19 bp, Artificial Sequence
  oligonucleotide 27304
ctttccaccatccctctac

SEQ ID NO: 4679 - DNA, 22 bp, Artificial Sequence
  oligonucleotide 27317
ttgaatttagaggtagggaaag

SEQ ID NO: 4680 - DNA, 25 bp, Artificial Sequence
  oligonucleotide 27318
aaatacacaaaataaaacactcaaa

SEQ ID NO: 4681 - DNA, 21 bp, Artificial Sequence
  oligonucleotide 27345
aggaaaaaggtgggttagttt

SEQ ID NO: 4682 - DNA, 26 bp, Artificial Sequence
  oligonucleotide 27346
tcaatacacactaaacaaattcataa

SEQ ID NO: 4683 - DNA, 19 bp, Artificial Sequence
  oligonucleotide 27363
tgagtggttgtggatgttt

SEQ ID NO: 4684 - DNA, 21 bp, Artificial Sequence
  oligonucleotide 27364
tcttcaaataaatcccctttt

SEQ ID NO: 4685 - DNA, 23 bp, Artificial Sequence
  oligonucleotide 27383
gataaatatgttggttgggtaga

SEQ ID NO: 4686 - DNA, 19 bp, Artificial Sequence
  oligonucleotide 27384
ccataaaaccccctctaaa

SEQ ID NO: 4687 - DNA, 21 bp, Artificial Sequence
  oligonucleotide 27399
gggtttagagttggtaggtgt

SEQ ID NO: 4688 - DNA, 23 bp, Artificial Sequence
  oligonucleotide 27400
atattatctcccctccataaact

SEQ ID NO: 4689 - DNA, 20 bp, Artificial Sequence
  oligonucleotide 28008
attgtaaggtttggggtgat

SEQ ID NO: 4690 - DNA, 22 bp, Artificial Sequence
  oligonucleotide 28009
ccaaaaaccatctttaatatcc

SEQ ID NO: 4691 - DNA, 23 bp, Artificial Sequence
  oligonucleotide 28012
tggtatgtttgaaaagtattgtg

SEQ ID NO: 4692 - DNA, 18 bp, Artificial Sequence
  oligonucleotide 28013
ccccacctctacccctac

SEQ ID NO: 4693 - DNA, 27 bp, Artificial Sequence
  oligonucleotide 28102
aagttttattggatataggtaggtaaa

SEQ ID NO: 4694 - DNA, 23 bp, Artificial Sequence
  oligonucleotide 28103
tcaacacattcttcatcactaaa

SEQ ID NO: 4695 - DNA, 21 bp, Artificial Sequence
  oligonucleotide 28178
ggtttagggtagttgaaatgg

SEQ ID NO: 4696 - DNA, 21 bp, Artificial Sequence
  oligonucleotide 28179
ctataatccccaaccaaacaa

SEQ ID NO: 4697 - DNA, 24 bp, Artificial Sequence
  oligonucleotide 28290
gtttgtttggagtggtttatattt

SEQ ID NO: 4698 - DNA, 20 bp, Artificial Sequence
  oligonucleotide 28291
caaacttcctcatttccatt

SEQ ID NO: 4699 - DNA, 20 bp, Artificial Sequence
  oligonucleotide 28308
gtggaagagtagagggagga

SEQ ID NO: 4700 - DNA, 21 bp, Artificial Sequence
  oligonucleotide 28309
cccaaacaaaaatcaacataa

SEQ ID NO: 4701 - DNA, 21 bp, Artificial Sequence
  oligonucleotide 28480
tgggatttttgagatgagatt

SEQ ID NO: 4702 - DNA, 19 bp, Artificial Sequence
  oligonucleotide 28481
ccaatcaacaaccttaccc

SEQ ID NO: 4703 - DNA, 24 bp, Artificial Sequence
  oligonucleotide 28484
ttttagaaggaaggtaataaggaa

SEQ ID NO: 4704 - DNA, 23 bp, Artificial Sequence
  oligonucleotide 28485
ctactctataaaaccatcccaaa

SEQ ID NO: 4705 - DNA, 18 bp, Artificial Sequence
  oligonucleotide 28486
tttttgttgtgggaggag

SEQ ID NO: 4706 - DNA, 20 bp, Artificial Sequence
  oligonucleotide 28487
tatcccaaccacttctaacc

SEQ ID NO: 4707 - DNA, 18 bp, Artificial Sequence
  oligonucleotide 28490
gggttgaggagaataggg

SEQ ID NO: 4708 - DNA, 23 bp, Artificial Sequence
  oligonucleotide 28491
ctccaatacaaaattccttaaaa

SEQ ID NO: 4709 - DNA, 19 bp, Artificial Sequence
  oligonucleotide 28538
gggtagtttggatggtgtt

SEQ ID NO: 4710 - DNA, 23 bp, Artificial Sequence
  oligonucleotide 28539
ccaaatcaaaaacttctcaataa

SEQ ID NO: 4711 - DNA, 23 bp, Artificial Sequence
  oligonucleotide 28544
atatggtttgtttggtaattgtt

SEQ ID NO: 4712 - DNA, 23 bp, Artificial Sequence
  oligonucleotide 28545
aaatacttctcctcctacacaaa

SEQ ID NO: 4713 - DNA, 21 bp, Artificial Sequence
  oligonucleotide 28550
agagtaatttggggtgagttt

SEQ ID NO: 4714 - DNA, 25 bp, Artificial Sequence
  oligonucleotide 28551
actaaatctcctatctccctaacat

SEQ ID NO: 4715 - DNA, 22 bp, Artificial Sequence
  oligonucleotide 28578
ggtggagtttatgtgtagtgaa

SEQ ID NO: 4716 - DNA, 25 bp, Artificial Sequence
  oligonucleotide 28579
ctctattccttaaaacaaaccataa

SEQ ID NO: 4717 - DNA, 25 bp, Artificial Sequence
  oligonucleotide 28582
aggaaggtagtagagaatggtttta

SEQ ID NO: 4718 - DNA, 21 bp, Artificial Sequence
  oligonucleotide 28583
cccacctaataaaaatccaaa

SEQ ID NO: 4719 - DNA, 23 bp, Artificial Sequence
  oligonucleotide 28604
ttgttagagaataaagagtgggt

SEQ ID NO: 4720 - DNA, 23 bp, Artificial Sequence
  oligonucleotide 28605
tcacaatcaacacaaaataaaaa

SEQ ID NO: 4721 - DNA, 21 bp, Artificial Sequence
  oligonucleotide 803
tgagaagagtagagggtggtt

SEQ ID NO: 4722 - DNA, 22 bp, Artificial Sequence
  oligonucleotide 804
acctctcaaaaatccaaactaa

SEQ ID NO: 4723 - DNA, 22 bp, Artificial Sequence
  oligonucleotide 1049
ttttgaatttgggttatttagg

SEQ ID NO: 4724 - DNA, 21 bp, Artificial Sequence
  oligonucleotide 1050
aaaaccttactcattccaacc

SEQ ID NO: 4725 - DNA, 22 bp, Artificial Sequence
  oligonucleotide 9657
tgtttttgtagttgaagttgga

SEQ ID NO: 4726 - DNA, 19 bp, Artificial Sequence
  oligonucleotide 9658
ccacctaaccaccctacat

SEQ ID NO: 4727 - DNA, 22 bp, Artificial Sequence
  oligonucleotide 9727
ttttgtatttgggaaagaggta

SEQ ID NO: 4728 - DNA, 22 bp, Artificial Sequence
  oligonucleotide 9728
tcattaactatcattccaccct

SEQ ID NO: 4729 - DNA, 22 bp, Artificial Sequence
  oligonucleotide 9843
tttggagagtaggagaagaaaa

SEQ ID NO: 4730 - DNA, 21 bp, Artificial Sequence
  oligonucleotide 9844
aaacctccccctataacaaac

SEQ ID NO: 4731 - DNA, 24 bp, Artificial Sequence
  oligonucleotide 9861
aggttagtttatagtgggatgaat

SEQ ID NO: 4732 - DNA, 19 bp, Artificial Sequence
  oligonucleotide 9862
taaaacccaccctccctta

SEQ ID NO: 4733 - DNA, 26 bp, Artificial Sequence
  oligonucleotide 9885
gtttttgagatagatagaaatgtggt

SEQ ID NO: 4734 - DNA, 21 bp, Artificial Sequence
  oligonucleotide 9886
ctaaaaccaaataaccctccc

SEQ ID NO: 4735 - DNA, 21 bp, Artificial Sequence
  oligonucleotide 9889
ttttgttttggtgataggaga

SEQ ID NO: 4736 - DNA, 19 bp, Artificial Sequence
  oligonucleotide 9890
actccatccaacccctaat

SEQ ID NO: 4737 - DNA, 25 bp, Artificial Sequence
  oligonucleotide 9927
gaaataggggattaggttttatttt

SEQ ID NO: 4738 - DNA, 22 bp, Artificial Sequence
  oligonucleotide 9928
acctacaaatatcacatcccac

SEQ ID NO: 4739 - DNA, 22 bp, Artificial Sequence
  oligonucleotide 10065
gttttgtagaggtgtaggggta

SEQ ID NO: 4740 - DNA, 22 bp, Artificial Sequence
  oligonucleotide 10066
acacaaacccaatttctacttc

SEQ ID NO: 4741 - DNA, 22 bp, Artificial Sequence
  oligonucleotide 10069
ttgtttttgggaaatgtttagt

SEQ ID NO: 4742 - DNA, 22 bp, Artificial Sequence
  oligonucleotide 10070
tttttaattcctccctaccata

SEQ ID NO: 4743 - DNA, 23 bp, Artificial Sequence
  oligonucleotide 10137
ggagttttgtgtagtatttgggt

SEQ ID NO: 4744 - DNA, 21 bp, Artificial Sequence
  oligonucleotide 10138
actttcaaaataaacatcccc

SEQ ID NO: 4745 - DNA, 21 bp, Artificial Sequence
  oligonucleotide 10573
ggttttggagaaggttgttag

SEQ ID NO: 4746 - DNA, 20 bp, Artificial Sequence
  oligonucleotide 10574
cccaccatcaccttatactc

SEQ ID NO: 4747 - DNA, 22 bp, Artificial Sequence
  oligonucleotide 10609
tagaagtgggtttggtttattt

SEQ ID NO: 4748 - DNA, 22 bp, Artificial Sequence
  oligonucleotide 10610
cacctctcaaacatcctctaat

SEQ ID NO: 4749 - DNA, 23 bp, Artificial Sequence
  oligonucleotide 11453
atgataattttgtgtttttggtg

SEQ ID NO: 4750 - DNA, 27 bp, Artificial Sequence
  oligonucleotide 11454
aacatactttcacttcatttaatccta

SEQ ID NO: 4751 - DNA, 18 bp, Artificial Sequence
  oligonucleotide 11541
gattgggtatgggaggag

SEQ ID NO: 4752 - DNA, 22 bp, Artificial Sequence
  oligonucleotide 11542
aaccccacattaacctaataac

SEQ ID NO: 4753 - DNA, 22 bp, Artificial Sequence
  oligonucleotide 11661
aatagaggtggttgtttgtttt

SEQ ID NO: 4754 - DNA, 23 bp, Artificial Sequence
  oligonucleotide 11662
aaccttcaatccatatctcataa

SEQ ID NO: 4755 - DNA, 27 bp, Artificial Sequence
  oligonucleotide 11715
atttagtatagttgtggtgtttttaag

SEQ ID NO: 4756 - DNA, 23 bp, Artificial Sequence
  oligonucleotide 11716
aaaattactctctctatcccacc

SEQ ID NO: 4757 - DNA, 21 bp, Artificial Sequence
  oligonucleotide 11725
ttaaggattttaattttgggg

SEQ ID NO: 4758 - DNA, 21 bp, Artificial Sequence
  oligonucleotide 11726
acctcctctttcctctaaacc

SEQ ID NO: 4759 - DNA, 22 bp, Artificial Sequence
  oligonucleotide 11735
agagtatgaatttggtaggggt

SEQ ID NO: 4760 - DNA, 22 bp, Artificial Sequence
  oligonucleotide 11736
tttttacttaacatttccctcc

SEQ ID NO: 4761 - DNA, 18 bp, Artificial Sequence
  oligonucleotide 11745
ggaggaaagagggttgag

SEQ ID NO: 4762 - DNA, 22 bp, Artificial Sequence
  oligonucleotide 11746
cctcctaaaatctccaatacaa

SEQ ID NO: 4763 - DNA, 22 bp, Artificial Sequence
  oligonucleotide 11793
tataggggataggaagtgtttg

SEQ ID NO: 4764 - DNA, 23 bp, Artificial Sequence
  oligonucleotide 11794
aaaaataaactcacaataaccca

SEQ ID NO: 4765 - DNA, 22 bp, Artificial Sequence
  oligonucleotide 11837
gggttttaggatttgttaggtt

SEQ ID NO: 4766 - DNA, 20 bp, Artificial Sequence
  oligonucleotide 11838
actctcaacccctctacctt

SEQ ID NO: 4767 - DNA, 22 bp, Artificial Sequence
  oligonucleotide 11907
tggatatgttttgggtatattg

SEQ ID NO: 4768 - DNA, 25 bp, Artificial Sequence
  oligonucleotide 11908
atatctcactctctaacctttacca

SEQ ID NO: 4769 - DNA, 18 bp, Artificial Sequence
  oligonucleotide 11939
tttttgtagagggtgggg

SEQ ID NO: 4770 - DNA, 22 bp, Artificial Sequence
  oligonucleotide 11940
aaaatccttccccatataaatc

SEQ ID NO: 4771 - DNA, 23 bp, Artificial Sequence
  oligonucleotide 12067
tagagataggtttttgggaatta

SEQ ID NO: 4772 - DNA, 25 bp, Artificial Sequence
  oligonucleotide 12068
ccctactaaactattccaactttac

SEQ ID NO: 4773 - DNA, 21 bp, Artificial Sequence
  oligonucleotide 12075
ttagaatgaggtaggaggtgg

SEQ ID NO: 4774 - DNA, 21 bp, Artificial Sequence
  oligonucleotide 12076
aaaccttttaatccctcaaac

SEQ ID NO: 4775 - DNA, 21 bp, Artificial Sequence
  oligonucleotide 12085
ttagaatgaggtaggaggtgg

SEQ ID NO: 4776 - DNA, 21 bp, Artificial Sequence
  oligonucleotide 12086
aaaccttttaatccctcaaac

SEQ ID NO: 4777 - DNA, 22 bp, Artificial Sequence
  oligonucleotide 12137
gggattgttattatatgggttg

SEQ ID NO: 4778 - DNA, 20 bp, Artificial Sequence
  oligonucleotide 12138
aaactacctttcccatcacc

SEQ ID NO: 4779 - DNA, 22 bp, Artificial Sequence
  oligonucleotide 12147
tgtggtgtgaattaagatatgg

SEQ ID NO: 4780 - DNA, 22 bp, Artificial Sequence
  oligonucleotide 12148
taccaaacccaactaacaaaat

SEQ ID NO: 4781 - DNA, 18 bp, Artificial Sequence
  oligonucleotide 12239
gggtggttgtgatgtgtt

SEQ ID NO: 4782 - DNA, 22 bp, Artificial Sequence
  oligonucleotide 12240
atcccctaacttaaaaccctaa

SEQ ID NO: 4783 - DNA, 22 bp, Artificial Sequence
  oligonucleotide 12299
ttaagggagggagatgtaagta

SEQ ID NO: 4784 - DNA, 25 bp, Artificial Sequence
  oligonucleotide 12300
tcctaaactaaataattcacaaacc

SEQ ID NO: 4785 - DNA, 23 bp, Artificial Sequence
  oligonucleotide 12315
gattggtgtaggtggttagtagt

SEQ ID NO: 4786 - DNA, 21 bp, Artificial Sequence
  oligonucleotide 12316
accaaatcctcaatctcaaac

SEQ ID NO: 4787 - DNA, 18 bp, Artificial Sequence
  oligonucleotide 12323
ggggtggggttgtagtag

SEQ ID NO: 4788 - DNA, 18 bp, Artificial Sequence
  oligonucleotide 12324
ccccaaaaccttcttctc

SEQ ID NO: 4789 - DNA, 21 bp, Artificial Sequence
  oligonucleotide 12347
ggttttagatggtagaggggt

SEQ ID NO: 4790 - DNA, 25 bp, Artificial Sequence
  oligonucleotide 12348
accaataactacaaaacaatttaca

SEQ ID NO: 4791 - DNA, 21 bp, Artificial Sequence
  oligonucleotide 12387
gtggagttttggggttattag

SEQ ID NO: 4792 - DNA, 18 bp, Artificial Sequence
  oligonucleotide 12388
acaacctcccctctcaaa

SEQ ID NO: 4793 - DNA, 22 bp, Artificial Sequence
  oligonucleotide 12715
ttggtagtatttgggaagtttt

SEQ ID NO: 4794 - DNA, 22 bp, Artificial Sequence
  oligonucleotide 12716
taaacaacctcacacacctctt

SEQ ID NO: 4795 - DNA, 23 bp, Artificial Sequence
  oligonucleotide 12919
taaggttatgattgagaagttgg

SEQ ID NO: 4796 - DNA, 23 bp, Artificial Sequence
  oligonucleotide 12920
tccctataaaaccacacaataac

SEQ ID NO: 4797 - DNA, 22 bp, Artificial Sequence
  oligonucleotide 13123
atatgttggtggtagttttggt

SEQ ID NO: 4798 - DNA, 19 bp, Artificial Sequence
  oligonucleotide 13124
ccccaccttctcaattaac

SEQ ID NO: 4799 - DNA, 19 bp, Artificial Sequence
  oligonucleotide 13219
tatttgagggatggggaat

SEQ ID NO: 4800 - DNA, 27 bp, Artificial Sequence
  oligonucleotide 13220
aaaacaataaatataaaccactctacc

SEQ ID NO: 4801 - DNA, 27 bp, Artificial Sequence
  oligonucleotide 13441
gttgtttagtaatgatttgtgttaggt

SEQ ID NO: 4802 - DNA, 21 bp, Artificial Sequence
  oligonucleotide 13442
ttcaaaaacatccccttaaaa

SEQ ID NO: 4803 - DNA, 21 bp, Artificial Sequence
  oligonucleotide 17527
ggttggttttgagaagagttt

SEQ ID NO: 4804 - DNA, 24 bp, Artificial Sequence
  oligonucleotide 17528
accaatcttcctaactcatttact

SEQ ID NO: 4805 - DNA, 22 bp, Artificial Sequence
  oligonucleotide 17995
ggatgtaatttggagagtagga

SEQ ID NO: 4806 - DNA, 22 bp, Artificial Sequence
  oligonucleotide 17996
atctcaaccatataaacaaccc

SEQ ID NO: 4807 - DNA, 25 bp, Artificial Sequence
  oligonucleotide 18053
ttttagtttgtttatggttaggagt

SEQ ID NO: 4808 - DNA, 25 bp, Artificial Sequence
  oligonucleotide 18054
tttttcaacttaacatctttacatc

SEQ ID NO: 4809 - DNA, 24 bp, Artificial Sequence
  oligonucleotide 18059
agaaagatttatgggtttatagga

SEQ ID NO: 4810 - DNA, 25 bp, Artificial Sequence
  oligonucleotide 18060
catttacaacttttcactaacaaaa

SEQ ID NO: 4811 - DNA, 22 bp, Artificial Sequence
  oligonucleotide 18083
tggtttgatttaggtgtaaaga

SEQ ID NO: 4812 - DNA, 22 bp, Artificial Sequence
  oligonucleotide 18084
accatctacctctccaaaatac

SEQ ID NO: 4813 - DNA, 23 bp, Artificial Sequence
  oligonucleotide 18145
ttgtatgtagttgtgagaaagga

SEQ ID NO: 4814 - DNA, 22 bp, Artificial Sequence
  oligonucleotide 18146
aaattcttccctaaccctaaaa

SEQ ID NO: 4815 - DNA, 18 bp, Artificial Sequence
  oligonucleotide 18191
gtgtgtgggaagaggttg

SEQ ID NO: 4816 - DNA, 22 bp, Artificial Sequence
  oligonucleotide 18192
caaatccaactaacataatcca

SEQ ID NO: 4817 - DNA, 21 bp, Artificial Sequence
  oligonucleotide 18393
ggagttttgggtagatgtttt

SEQ ID NO: 4818 - DNA, 24 bp, Artificial Sequence
  oligonucleotide 18394
aatctaatcctcttcctattacca

SEQ ID NO: 4819 - DNA, 20 bp, Artificial Sequence
  oligonucleotide 18445
gattggagggagagaatagg

SEQ ID NO: 4820 - DNA, 24 bp, Artificial Sequence
  oligonucleotide 18446
cctctcttatcaatacttatccca

SEQ ID NO: 4821 - DNA, 18 bp, Artificial Sequence
  oligonucleotide 18477
gggggaggatagggttta

SEQ ID NO: 4822 - DNA, 25 bp, Artificial Sequence
  oligonucleotide 18478
tcacataatttactctcaacaaaaa

SEQ ID NO: 4823 - DNA, 24 bp, Artificial Sequence
  oligonucleotide 18649
aaggttttgtttttgattagtagg

SEQ ID NO: 4824 - DNA, 23 bp, Artificial Sequence
  oligonucleotide 18650
atttttaacacccatacacattt

SEQ ID NO: 4825 - DNA, 24 bp, Artificial Sequence
  oligonucleotide 18837
gtataggggttttagggagagtta

SEQ ID NO: 4826 - DNA, 24 bp, Artificial Sequence
  oligonucleotide 18838
ctctaacccaccttttatttttat

SEQ ID NO: 4827 - DNA, 27 bp, Artificial Sequence
  oligonucleotide 19009
agtttaaggtattaagttttggatatt

SEQ ID NO: 4828 - DNA, 23 bp, Artificial Sequence
  oligonucleotide 19010
ccctaacaataaccctatctcct

SEQ ID NO: 4829 - DNA, 24 bp, Artificial Sequence
  oligonucleotide 19099
gtattgtttgaatgttaggtagga

SEQ ID NO: 4830 - DNA, 21 bp, Artificial Sequence
  oligonucleotide 19100
aaacccaataacaaccctaaa

SEQ ID NO: 4831 - DNA, 22 bp, Artificial Sequence
  oligonucleotide 19427
gatttatttgtgttggtggaaa

SEQ ID NO: 4832 - DNA, 19 bp, Artificial Sequence
  oligonucleotide 19428
acaacctaaaccccctaca

SEQ ID NO: 4833 - DNA, 22 bp, Artificial Sequence
  oligonucleotide 19465
ttttgattttagaaggtttgga

SEQ ID NO: 4834 - DNA, 23 bp, Artificial Sequence
  oligonucleotide 19466
ttcattattttcacttccctaaa

SEQ ID NO: 4835 - DNA, 23 bp, Artificial Sequence
  oligonucleotide 22029
gggaggtaggaagagtagtagtt

SEQ ID NO: 4836 - DNA, 22 bp, Artificial Sequence
  oligonucleotide 22030
tctccattacttcacaaattca

SEQ ID NO: 4837 - DNA, 18 bp, Artificial Sequence
  oligonucleotide 22097
tattggaaatggggaagg

SEQ ID NO: 4838 - DNA, 24 bp, Artificial Sequence
  oligonucleotide 22098
aatatccactctcaaaacaaataa

SEQ ID NO: 4839 - DNA, 26 bp, Artificial Sequence
  oligonucleotide 22113
ttttataggtgtatgagagaaaattg

SEQ ID NO: 4840 - DNA, 21 bp, Artificial Sequence
  oligonucleotide 22114
cctccacacaatcaaaaacta

SEQ ID NO: 4841 - DNA, 25 bp, Artificial Sequence
  oligonucleotide 22187
gggaagttatttaatgtagatgttt

SEQ ID NO: 4842 - DNA, 21 bp, Artificial Sequence
  oligonucleotide 22188
actctcccaatctattttcca

SEQ ID NO: 4843 - DNA, 18 bp, Artificial Sequence
  oligonucleotide 22211
tgatgtttttggggtagg

SEQ ID NO: 4844 - DNA, 25 bp, Artificial Sequence
  oligonucleotide 22212
aacctctaatctcacaccttaacta

SEQ ID NO: 4845 - DNA, 25 bp, Artificial Sequence
  oligonucleotide 22213
ttttaagttattttgggttttaagt

SEQ ID NO: 4846 - DNA, 22 bp, Artificial Sequence
  oligonucleotide 22214
aaccactccataacacattttt

SEQ ID NO: 4847 - DNA, 21 bp, Artificial Sequence
  oligonucleotide 22217
tttgggaggatggatataagt

SEQ ID NO: 4848 - DNA, 21 bp, Artificial Sequence
  oligonucleotide 22218
ccaaccaaacttttccaaata

SEQ ID NO: 4849 - DNA, 21 bp, Artificial Sequence
  oligonucleotide 22219
aggaaaatgggtagatggtat

SEQ ID NO: 4850 - DNA, 26 bp, Artificial Sequence
  oligonucleotide 22220
aaccactcaaaactacaatataaaaa

SEQ ID NO: 4851 - DNA, 26 bp, Artificial Sequence
  oligonucleotide 22289
ggaaaattaggtttgtatagtatttg

SEQ ID NO: 4852 - DNA, 20 bp, Artificial Sequence
  oligonucleotide 22290
ctcaaaacccaccatctaaa

SEQ ID NO: 4853 - DNA, 22 bp, Artificial Sequence
  oligonucleotide 22301
gagttaaggaagaagggagttg

SEQ ID NO: 4854 - DNA, 23 bp, Artificial Sequence
  oligonucleotide 22302
atcttcaaaacttccaaacataa

SEQ ID NO: 4855 - DNA, 19 bp, Artificial Sequence
  oligonucleotide 22313
gtttggggaagatgatttg

SEQ ID NO: 4856 - DNA, 23 bp, Artificial Sequence
  oligonucleotide 22314
ccatcaaatacacacaatttcta

SEQ ID NO: 4857 - DNA, 23 bp, Artificial Sequence
  oligonucleotide 22391
agtatggttagaggaattgaaga

SEQ ID NO: 4858 - DNA, 22 bp, Artificial Sequence
  oligonucleotide 22392
attccaactccacatcaaatta

SEQ ID NO: 4859 - DNA, 20 bp, Artificial Sequence
  oligonucleotide 22431
tgtggaagggattttaggtt

SEQ ID NO: 4860 - DNA, 22 bp, Artificial Sequence
  oligonucleotide 22432
ccctcctctctacacattaact

SEQ ID NO: 4861 - DNA, 21 bp, Artificial Sequence
  oligonucleotide 22441
tgataagggtgtttttgtgtt

SEQ ID NO: 4862 - DNA, 21 bp, Artificial Sequence
  oligonucleotide 22442
tcaacatctccactacctacc

SEQ ID NO: 4863 - DNA, 25 bp, Artificial Sequence
  oligonucleotide 22509
tttggtttaaggaagtaaataaggt

SEQ ID NO: 4864 - DNA, 21 bp, Artificial Sequence
  oligonucleotide 22510
aatcccaactaaatccttcac

SEQ ID NO: 4865 - DNA, 22 bp, Artificial Sequence
  oligonucleotide 22555
ggtattgggaggattagagatt

SEQ ID NO: 4866 - DNA, 21 bp, Artificial Sequence
  oligonucleotide 22556
tccttttaatcaaccaactca

SEQ ID NO: 4867 - DNA, 21 bp, Artificial Sequence
  oligonucleotide 22563
gattggggaaagttagtgagt

SEQ ID NO: 4868 - DNA, 19 bp, Artificial Sequence
  oligonucleotide 22564
cttccaaaccccataacac

SEQ ID NO: 4869 - DNA, 20 bp, Artificial Sequence
  oligonucleotide 22573
gaggttattgagggaggagt

SEQ ID NO: 4870 - DNA, 20 bp, Artificial Sequence
  oligonucleotide 22574
cccccaacctttacaactta

SEQ ID NO: 4871 - DNA, 21 bp, Artificial Sequence
  oligonucleotide 22593
aagggtttattgttggagaag

SEQ ID NO: 4872 - DNA, 27 bp, Artificial Sequence
  oligonucleotide 22594
tctacctaactaccctatactcacaaa

SEQ ID NO: 4873 - DNA, 18 bp, Artificial Sequence
  oligonucleotide 22599
tataagggttgggggtgt

SEQ ID NO: 4874 - DNA, 19 bp, Artificial Sequence
  oligonucleotide 22600
ccactacccctcctaaaaa

SEQ ID NO: 4875 - DNA, 20 bp, Artificial Sequence
  oligonucleotide 22609
ggtaggttgggaagttgttt

SEQ ID NO: 4876 - DNA, 18 bp, Artificial Sequence
  oligonucleotide 22610
aacccctccttcattcct

SEQ ID NO: 4877 - DNA, 22 bp, Artificial Sequence
  oligonucleotide 22627
ggggaaaataaagttagtgaga

SEQ ID NO: 4878 - DNA, 19 bp, Artificial Sequence
  oligonucleotide 22628
cctcatatccccaacaaaa

SEQ ID NO: 4879 - DNA, 18 bp, Artificial Sequence
  oligonucleotide 22647
ttttgggagtggaggttt

SEQ ID NO: 4880 - DNA, 25 bp, Artificial Sequence
  oligonucleotide 22648
ccacctaactataataaacaccctt

SEQ ID NO: 4881 - DNA, 20 bp, Artificial Sequence
  oligonucleotide 22733
agagggtaggaattgggtat

SEQ ID NO: 4882 - DNA, 20 bp, Artificial Sequence
  oligonucleotide 22734
caaacctccccacaatctat

SEQ ID NO: 4883 - DNA, 21 bp, Artificial Sequence
  oligonucleotide 22735
gtttgaatggttttgggttat

SEQ ID NO: 4884 - DNA, 22 bp, Artificial Sequence
  oligonucleotide 22736
tcttcctccctactctacaaaa

SEQ ID NO: 4885 - DNA, 18 bp, Artificial Sequence
  oligonucleotide 22789
gggatagatggtgggaga

SEQ ID NO: 4886 - DNA, 21 bp, Artificial Sequence
  oligonucleotide 22790
ccccttacctaataccaaaaa

SEQ ID NO: 4887 - DNA, 22 bp, Artificial Sequence
  oligonucleotide 22855
ggaatgtaggggagttagagtt

SEQ ID NO: 4888 - DNA, 22 bp, Artificial Sequence
  oligonucleotide 22856
tttcatccaaaaccattataca

SEQ ID NO: 4889 - DNA, 18 bp, Artificial Sequence
  oligonucleotide 22871
gagtgggtgtgagggttt

SEQ ID NO: 4890 - DNA, 25 bp, Artificial Sequence
  oligonucleotide 22872
tcaattactaaaacaaataattccc

SEQ ID NO: 4891 - DNA, 18 bp, Artificial Sequence
  oligonucleotide 22903
gagtgggagaggggtaag

SEQ ID NO: 4892 - DNA, 25 bp, Artificial Sequence
  oligonucleotide 22904
tttccttacaatctctataccaaaa

SEQ ID NO: 4893 - DNA, 20 bp, Artificial Sequence
  oligonucleotide 22907
ggtgttaggggtaatgagga

SEQ ID NO: 4894 - DNA, 25 bp, Artificial Sequence
  oligonucleotide 22908
aacctaaaaacatctactcttcaaa

SEQ ID NO: 4895 - DNA, 20 bp, Artificial Sequence
  oligonucleotide 22937
ggggttatggatgtatggtt

SEQ ID NO: 4896 - DNA, 22 bp, Artificial Sequence
  oligonucleotide 22938
tcattctcccctaaaattacaa

SEQ ID NO: 4897 - DNA, 25 bp, Artificial Sequence
  oligonucleotide 22961
ggtgtaggtatttgtagtatagggt

SEQ ID NO: 4898 - DNA, 18 bp, Artificial Sequence
  oligonucleotide 22962
caaacctccattatccca

SEQ ID NO: 4899 - DNA, 20 bp, Artificial Sequence
  oligonucleotide 22963
gggttgggttaggatagaga

SEQ ID NO: 4900 - DNA, 21 bp, Artificial Sequence
  oligonucleotide 22964
ccaccactattatctccaaaa

SEQ ID NO: 4901 - DNA, 19 bp, Artificial Sequence
  oligonucleotide 23289
ttggtaaaggggttgtttt

SEQ ID NO: 4902 - DNA, 22 bp, Artificial Sequence
  oligonucleotide 23290
aacccttcttttacttcactca

SEQ ID NO: 4903 - DNA, 26 bp, Artificial Sequence
  oligonucleotide 23425
ttgattttattagtatatgggtttgt

SEQ ID NO: 4904 - DNA, 21 bp, Artificial Sequence
  oligonucleotide 23426
ttaactctcattccctaacca

SEQ ID NO: 4905 - DNA, 22 bp, Artificial Sequence
  oligonucleotide 23431
ggtgtttattgagtttggaaat

SEQ ID NO: 4906 - DNA, 21 bp, Artificial Sequence
  oligonucleotide 23432
acctttaccctccctctacaa

SEQ ID NO: 4907 - DNA, 21 bp, Artificial Sequence
  oligonucleotide 23439
gtttaatttggttgagtggaa

SEQ ID NO: 4908 - DNA, 22 bp, Artificial Sequence
  oligonucleotide 23440
caaccctatccctttaacacta

SEQ ID NO: 4909 - DNA, 24 bp, Artificial Sequence
  oligonucleotide 23453
ataaaattgaaggttttgttgttt

SEQ ID NO: 4910 - DNA, 21 bp, Artificial Sequence
  oligonucleotide 23454
ccatcacttcatacaaattcc

SEQ ID NO: 4911 - DNA, 25 bp, Artificial Sequence
  oligonucleotide 23535
agggaaaggataaattagtaaaagt

SEQ ID NO: 4912 - DNA, 19 bp, Artificial Sequence
  oligonucleotide 23536
ttcccctctaaaaccaaaa

SEQ ID NO: 4913 - DNA, 22 bp, Artificial Sequence
  oligonucleotide 23597
ttaaggaggtatggtggttaat

SEQ ID NO: 4914 - DNA, 23 bp, Artificial Sequence
  oligonucleotide 23598
ctatctcttcctaaaccaaacaa

SEQ ID NO: 4915 - DNA, 26 bp, Artificial Sequence
  oligonucleotide 23607
ggttagatattgtttggagttaaatg

SEQ ID NO: 4916 - DNA, 24 bp, Artificial Sequence
  oligonucleotide 23608
ttcttttctttttccctatctcta

SEQ ID NO: 4917 - DNA, 19 bp, Artificial Sequence
  oligonucleotide 23615
ggaggttggtgtagggatt

SEQ ID NO: 4918 - DNA, 27 bp, Artificial Sequence
  oligonucleotide 23616
aacaaataacatctatctatcacaaaa

SEQ ID NO: 4919 - DNA, 21 bp, Artificial Sequence
  oligonucleotide 23627
agtagtttggagaaaaggtgg

SEQ ID NO: 4920 - DNA, 23 bp, Artificial Sequence
  oligonucleotide 23628
aaaataacaactcctaccaaaaa

SEQ ID NO: 4921 - DNA, 24 bp, Artificial Sequence
  oligonucleotide 23649
gttgagaagatgtgattgttattt

SEQ ID NO: 4922 - DNA, 24 bp, Artificial Sequence
  oligonucleotide 23650
ccctttactcttattatttccctc

SEQ ID NO: 4923 - DNA, 27 bp, Artificial Sequence
  oligonucleotide 23707
ttaggagttagttagagttttaggtgt

SEQ ID NO: 4924 - DNA, 21 bp, Artificial Sequence
  oligonucleotide 23708
cctttacaactaccctttcca

SEQ ID NO: 4925 - DNA, 19 bp, Artificial Sequence
  oligonucleotide 23747
gagatgagtaggggattgg

SEQ ID NO: 4926 - DNA, 21 bp, Artificial Sequence
  oligonucleotide 23748
tccctaacaaacccattaaaa

SEQ ID NO: 4927 - DNA, 27 bp, Artificial Sequence
  oligonucleotide 23749
tgagagttggaatagtagtagaaatta

SEQ ID NO: 4928 - DNA, 18 bp, Artificial Sequence
  oligonucleotide 23750
aacaccctctccctaccc

SEQ ID NO: 4929 - DNA, 23 bp, Artificial Sequence
  oligonucleotide 23755
gttgttggtgaagttttgagtat

SEQ ID NO: 4930 - DNA, 20 bp, Artificial Sequence
  oligonucleotide 23756
ctcacctcccatctaaacat

SEQ ID NO: 4931 - DNA, 25 bp, Artificial Sequence
  oligonucleotide 23805
ttggttatttttattttggagtatt

SEQ ID NO: 4932 - DNA, 19 bp, Artificial Sequence
  oligonucleotide 23806
caatttcctctacaacccc

SEQ ID NO: 4933 - DNA, 21 bp, Artificial Sequence
  oligonucleotide 23809
tggtagttaatagggaaaggg

SEQ ID NO: 4934 - DNA, 22 bp, Artificial Sequence
  oligonucleotide 23810
cctaccccacctaaatataaaa

SEQ ID NO: 4935 - DNA, 21 bp, Artificial Sequence
  oligonucleotide 23815
gggagtagtttgggtattttt

SEQ ID NO: 4936 - DNA, 18 bp, Artificial Sequence
  oligonucleotide 23816
tccttccaacctccctta

SEQ ID NO: 4937 - DNA, 21 bp, Artificial Sequence
  oligonucleotide 27315
gaagttagggtaggggatgtt

SEQ ID NO: 4938 - DNA, 25 bp, Artificial Sequence
  oligonucleotide 27316
tacctcccatttaacctataaacta

SEQ ID NO: 4939 - DNA, 19 bp, Artificial Sequence
  oligonucleotide 27337
gatgtggtttttgaagggt

SEQ ID NO: 4940 - DNA, 20 bp, Artificial Sequence
  oligonucleotide 27338
ccaaatactccttttccctc

SEQ ID NO: 4941 - DNA, 23 bp, Artificial Sequence
  oligonucleotide 28018
gaatagaatttagggttgaggtt

SEQ ID NO: 4942 - DNA, 26 bp, Artificial Sequence
  oligonucleotide 28019
tttcaattattctctccactaactaa

SEQ ID NO: 4943 - DNA, 25 bp, Artificial Sequence
  oligonucleotide 28488
agtgtagagaggttattgttgtttt

SEQ ID NO: 4944 - DNA, 25 bp, Artificial Sequence
  oligonucleotide 28489
atatactcactcttctcaactcctt

SEQ ID NO: 4945 - DNA, 20 bp, Homo Sapiens
cctgacttctagccctgtgc

SEQ ID NO: 4946 - DNA, 20 bp, Homo Sapiens
caggtcatgttcattgcgtc

SEQ ID NO: 4947 - DNA, 21 bp, Homo Sapiens
cccagcccctcaggacggaag

SEQ ID NO: 4948 - DNA, 22 bp, Homo Sapiens
gctgctggccaactccgaggaa

SEQ ID NO: 4949 - DNA, 20 bp, Homo Sapiens
gcaggaatccagacaacgat

SEQ ID NO: 4950 - DNA, 20 bp, Homo Sapiens
ccagaagatggtggaggtgt

SEQ ID NO: 4951 - DNA, 20 bp, Homo Sapiens
aagcgcatcacacagacaag

SEQ ID NO: 4952 - DNA, 20 bp, Homo Sapiens
agaagatctggagggccatt

SEQ ID NO: 4953 - DNA, 20 bp, Homo Sapiens
tcttgtttggctctctcggt

SEQ ID NO: 4954 - DNA, 20 bp, Homo Sapiens
ttgagcgatgtggtccatta

SEQ ID NO: 4955 - DNA, 20 bp, Homo Sapiens
gaatcctggctttttccctc

SEQ ID NO: 4956 - DNA, 20 bp, Homo Sapiens
ggcagagtccatcaagaagc

SEQ ID NO: 4957 - DNA, 20 bp, Homo Sapiens
ggagcacgggcacccagcat

SEQ ID NO: 4958 - DNA, 19 bp, Homo Sapiens
gggggtgggcggctgagag

SEQ ID NO: 4959 - DNA, 20 bp, Homo Sapiens
gatgaagcagatgcaccaga

SEQ ID NO: 4960 - DNA, 20 bp, Homo Sapiens
ttgctgactgatgtcttgcc

SEQ ID NO: 4961 - DNA, 20 bp, Homo Sapiens
agacggatgtgagggatttg

SEQ ID NO: 4962 - DNA, 20 bp, Homo Sapiens
gggaagaattcaacaggcaa

SEQ ID NO: 4963 - DNA, 23 bp, Homo Sapiens
gccggagttcttgtacgacctgc

SEQ ID NO: 4964 - DNA, 21 bp, Homo Sapiens
gggcgatgtcctctgcttcca

SEQ ID NO: 4965 - DNA, 20 bp, Homo Sapiens
ttccttttccacgcattttc

SEQ ID NO: 4966 - DNA, 20 bp, Homo Sapiens
gtggccatctgtgagatcct

SEQ ID NO: 4967 - DNA, 20 bp, Homo Sapiens
acggctgcttccagctcctc

SEQ ID NO: 4968 - DNA, 22 bp, Homo Sapiens
agccatgccaatctcatcttct
